United States Patent Application Publication US 2007/0283459 A1 - sequence listing, part 5

SEQ ID NO: 29529 - DNA, 373 bp, Glycine max
gagcaagagtgaagagtcgaagagaatggctcccagggtttaatctttttggctgtgttatgcttctcagcactgcactgagtcgttgtcttgcggaggataatggacttgttatgaacttctacaaggaatcatgccctcaggctgaagacatcatcaaagaacaagtcaagcttctctacaagcgccacaagaacactgctttctcctggctcagaaacatcttccatgactgtgctgttcaaagttgtgatgcttcactgttgctggactccacaagaaggagcttgtctgagaaggaaacagatagaagctttgggttgagaaatttcaggtacattgagaccatcaaagaagctttggaaagggaatg

SEQ ID NO: 29530 - DNA, 426 bp, Glycine max
  modified_base (294)..(294): a, c, g, t, unknown, or other
  modified_base (309)..(309): a, c, g, t, unknown, or other
  modified_base (360)..(360): a, c, g, t, unknown, or other
  modified_base (375)..(375): a, c, g, t, unknown, or other
gatacgcagattgtggttagtgttgacaaaagtaaaatggataatgaagaaaaagagtgttgattttgtgagagatgatgagttatgcaataggagcacttgttgttccgtctgcaactcccctaccttttttgaattccactgctccagtggaagtggaacatggtcatggtgtgaagcccattcaagattggtataagtggcgcctcgttttggcttatgatggaaccaaatacgcaggttggcaatatcagcagtctccccctactgtacaatgtactttggagaaagctntaactcgagcaacanagcttcaaaggaaggatttctgtttggttggtgcgagcaggaccgatgcangagttcatgcttggngtcaggttgctcatttttttacaccttttaactatgacaacttggaagaac

SEQ ID NO: 29531 - DNA, 404 bp, Glycine max
acattgctaatggaagtgttgcttcttgcttaagagagcgtcctccatatcaagaacccctggattggccaacccggaaaagagtagctttgggatctgcaaggggtctttcatatttgcatgatcattgcgacccaaagattattcatcgtgatgtgaaggctgtgaacatattgctggatgaagagtttgaggctgttgttgcggactttggattggccaaacttatggattacaaggacacgcatgtgacaactgctgtacggtgcactatcgggcatatagctactgagtacctttccactggtaaatcttcagagaaaactgacgtttctggttatggtatcatgcttctggagctgatcactggacagagagcttttgaccttgctcgactcgctaat

SEQ ID NO: 29532 - DNA, 296 bp, Glycine max
aataatagaatggcatctgggagtagaaaacacactacagagttcttcacgagaaattatgcatctaagaatcatcctatgctcaccaatcatctccgtcactccacccctggccttgtcatctacgacgtcgccttcagtatctacctcatcagctaacaaatctacaataggctctattctcccgatcctcattcgatttctcacgtgaaatccgcagatcaccactaaacttttgcactgacgcactccattccatcatcacttaataagtttaccaacatgttctctcaacc

SEQ ID NO: 29533 - DNA, 406 bp, Glycine max
ggtggcaggtgtgggttcttcaattcattctagttgtggattccgactagccgcgttgactcggttccgtttttcattctcgcggatctaatattaaggaatagcttaagggcacattacaatgaaggcattgattctggttgggggatttggaacaaggctgaggccactgacactcagtttccctaagcctcttgttgattttgctaacaagcctatgattttgcatcagatagaagcccttaaggccattggagtgactgaggtagtgctagccatcaattaccaaccagaggttatgttgaatttcttgaaagattttgaatcaaagctcggcatcaagatcacatgttctcaggaaacttgaccactgggaacagcaggtcccctggctcttgctagggat

SEQ ID NO: 29534 - DNA, 414 bp, Glycine max
gggaaggaagggagggaagaatagaatgggatctggaagtggaaaacacactggagagttcttcaggagaagggatgcatggaggaagcatccgatgctcaccaatcagctccgccacgccacccctggccttggcatcgccgtcgtcgccttcggtatctacctcgtcggcgaacaagtctacaataggctctatgctcccgatcctcattcgatttctcacgtgaaagccggggatcaccactaaacgtttggacggacgcactccattccatcatcacttaataagtttgctagcatgttctcgcagcctttaatgtttaaatttcagaccgtgttcgcttctttggcactcactatgttgtcttgtatgcctacattttatgccttcaatttgcattcacaatgaaactc

SEQ ID NO: 29535 - DNA, 176 bp, Glycine max
taaagggggaatttaagggagggaacaatacaataagatctgggggtagtgctcacactatagaggactacactataaggtatacattgaggactcatatgttactcaccaatcataatggacactcaaactcaagccatggaatctacttggtggacttcgaaatttacctattc

SEQ ID NO: 29536 - DNA, 431 bp, Glycine max
tgagagcaagagtgaagagcgaagagaatggctccgaagggtttaatctttttggctgtgttatgcttctcagcactgtcactgagtcgttgtcttgcggaggataatggacttgttatgaacttctacaaggaatcatgccctcaggctgaagacatcatcaaagaacaagtcaagcttctctacaagcgccacaagaacactgctttctcctggctcataaacatcttccatgactgagctgttcagagttgtgatgcttcactgttgctggactccacaagaaagagcttgtctgagaaggaaacagatagaagctttgggttgagaaatttcaggtacattgagaccatcaaagaagctttggaaagggaatgcccaggagttgtttcctgtgctgatatcctcgttctctctgccagagatggcat

SEQ ID NO: 29537 - DNA, 247 bp, Glycine max
tttggggatgatcagcagtgaaaaaaaactgctttgaaccccaatgattaattattaatcaaattcaattcaatgaccaaccaatcttcttcgccctctttactttgcgcttcttttaaccaggaccatatttacttttccgctggcaccacagatggtgttagaatatttgatgctaatacaggaaagcttttttatgaaagagggtaattcagatcccttaaataataaccttttttcttgttaa

SEQ ID NO: 29538 - DNA, 75 bp, Glycine max
aggtattggcaaagtacaacgaaagttggttttcagttgagaggcaaatggtaacgtaattgagtaataaggttt

SEQ ID NO: 29539 - DNA, 162 bp, Glycine max
gacgacggaaagactgtgtatcgggtattcagagacagagatgtgcccaaaacattagactgtgcgagacattgcctagcatctacaatagagtatggctacggaactgacccttctcggctggatataccatcacccgaaccatcatgaccaaactttccc

SEQ ID NO: 29540 - DNA, 257 bp, Glycine max
tatcagtggtggttgcatcatcgagtccggtttcacactgttcaaacataccggtggtggtggccatataggaggacattccttacatcaagtgtcaagcgtagtataagctctctaaagagttgcatcagcaggttcaattcaatctatctgatatcgctcccaaaaatatctcggtataccaaatcattgatatatctcataatgttttttatcatacaaaggtctattctgtttgtatattcggcatatgatat

SEQ ID NO: 29541 - DNA, 235 bp, Glycine max
ggttcagatcgcaagaaatattcaactgctttggacctccctgtaccaaactaaagcatatagcgaacaatgaccttccaaccttcttcactatctctacactgctcttttctcaaccagcaccataattactctgactctaaccatagaaatcccgttcgaatatttgatgctaatacacctaacactttgttattaatacatgcgcaatccaattcctctaattaatcaccac

SEQ ID NO: 29542 - DNA, 397 bp, Glycine max
ggatgagcagcagtgaaaaaaaacttgtttgaaccccaatgattaattattaatcaaattcaattcaatgaccaaccaatcttcttcgccctctttactttgcgcttctttcaaccaggaccatagttactttgccgttggcaccagagatggtgttagaatatttgatgctaatacaggaaggctttgttatgaaagaggtaaattcagttcctttaattaatcaccttttttcttgttaattttttcccccttccttcgtgtagcggttggagcttttgttattgctgagatgctgtttagctccaaccttcttgctatcgttggagctggtcatcagccatctttgtctcctcgccgtctttggttattcaatacaaccactggagctgctctt

SEQ ID NO: 29543 - DNA, 406 bp, Glycine max
gatcagtggtggttgcagcatggattcccctttcacactgttcaaagaaaccggtgggggtggctagaaaggaggacattccgtacatcaagtgtcaagtgtgtgagaagctcgctaaagagttgtatcagcaggttcaaaacaagcaagctgagatcgctcccaaaaagatctcggagtaccaaatcattgagatagcggagaatgtttgtaatctgaaaaaggtagaagcggattggatattgcgcatagatattgtggagaaagaagataggctggagctggtggaacaagactctgaaggacaatgtaattctgaatgcaagacaattgagcgagcctgtcaagaggtcataggatattctgataccgatgttgccgaatatttatataattccaagcctga

SEQ ID NO: 29544 - DNA, 134 bp, Glycine max
cccactcgtccgtactgttagaaaacaccatttaggggatccactgctggctacaacatcgggtccggtcccacactattaaacataacttatattcaattctataacccaccattcttcttccatctctttac

SEQ ID NO: 29545 - DNA, 393 bp, Glycine max
  modified_base (326)..(326): a, c, g, t, unknown, or other
gactctacaattgtgatcttcacaaatcaacaacgtctctctctgttactctgaaaattgacttcaagttagtataactggctgtcaagttgtaatggcattggtctctggaagaagttctgcactgaacccaaatgcacctctattcatacctgctgctcttcggcaggtggaggatttttcacctcaatggtgggatcttgtgaaatcttcaacatggtttcgtgattattggttgagccaacataaggaggaagaatttgaagttgccaatgactctagtaatgatgatattgagaatatgctctcagaaacttttgatctangcatggaagaagacttcaatgttctagagaacgagtttgagcggttggtgatgtcctctgaagctct

SEQ ID NO: 29546 - DNA, 379 bp, Glycine max
cgcacaaggaaacgcttgggaggagataaagagagagagagaagtgcagaaaaaatgagactgttcgatccatgggctgaattcttcaagatagaatgtacgcggaattggtccttcttggttggattctccatcaccgtaactctcatgaccaaactttcccttgggctctctgacgaggaagccaaaacgtcgaaattcgtccaggcacacattatgtgactttacaatggaacacttgcagtggctttgcacattgcattatatgtgtgaagagagctcatggttgtaatacatgaatagagatgtagtatacactacatgtccctatttacattgtggctgattactacaatgtgattgagaaattcatactcat

SEQ ID NO: 29547 - DNA, 411 bp, Glycine max
gatgttaaattagggaagtgtgtgaaagatgtgctaaagagcatttatacagagaatgctacagattccctcctcatttctggcatttatgcagttgctggaagtcaccaattttacaagaatgcaagaaatgaagcaaatgaactttaaagtagcaaattatggggtacatgaaaccgagggagaaagtatggtcaaggaggttggactcagcagagttgaaattgataattaggcatgagaatactaaaggttaacgaacaagtggtgtctctattacactaagtggtggccctctatgagtctatggtgcaccaaaactccatttgacatgtctgaacacagccagttcctcatgtaggaacacatggtaatacaattttgattgaatccgaaggtggtatggagcac

SEQ ID NO: 29548 - DNA, 412 bp, Glycine max
gacggctaaaagctaaaaatcatcgaagtactcaaattagcatggctgtcacggttgcattcttgaatttgatcatcatgttttcagtagtctctacaagcaagtcactgagcttaaactactattcaaaaacatgccctgatgtggaatgcattgttgccaaggcagtgaaggatgccactgctagggacaaaactgttccagctgcacttctgcgaatgcacttccatgactgtttcgttcgggggtgtgatgcctctgtgctgctaaattcaaaaggaagcaacaaagcagaaaaagatgggccaccaaatgtttctttgcatgcattctatgtcattgatgcagcgaagaaagcactagaagcttcatgcccaggtgtggtctcttgtgctgacatccttgctctagc

SEQ ID NO: 29549 - DNA, 353 bp, Glycine max
gacagaagcatggtgaagatgtggtgcattctttaaaggtttccttggaggacgtttataatggcacaacaaagaaactatctctttctagaaacatattatgcccaaaatggtaaaggaaagggtcaaaaaggggaacctcttgtaagggttttggatgccaaagcccttggttgaaaattacaagaaggcagattggacctagcatgattcaacaaattccacatgtctgtcctgactgcaaaagatctggtgaggtcattaacgagagagataaatgtccctctgtgcaaaggaaacaaggtttcccaggaaaagaaggtgctggaagtgcatgttgaaaagggcatgca

SEQ ID NO: 29550 - DNA, 406 bp, Glycine max
gaagtgggagttgaacaaggtctttttattggcagcttgttttattgccctctttattgaacttttatcataacattaagatatccccagcttcttgtcttttccctggcactcaaactcaattcactgatccaccacatgaggcactcagagagcatttgttgatttggatttggaaggtttttccactttggttacgggagcaacttaacttccttccttctctccttattttccacattgtacaaatgaattttcagggtacttggtaatagtggtgcctgacaaaaatattggagatggggattttgagtactattgcaagcttttttggatttggagtgggaacttcaattgggctagtcattggctactatttgttcatatacttccagccaacagatgt

SEQ ID NO: 29551 - DNA, 410 bp, Glycine max
ggaaaaaagagtgacactcattttaaacggaaattgctttagcataaaagagttcaagaggaggaagaacaacaagtagtaataactatatctacatagttatctttctcttgagctttgtaatttgaaacctatagatggaatggaggaagtgctacttggatgttatattggtgcccttggtgtttctaacaagcattgggtaccatttctggctatggcataaggttcgaactcagccacacacaaccatcattggcatcaatgctagtggccgtagaaattgggttaatgccatgatgaaggtacctagctatcttattttcattcttgtttttagttttggcttgctaagagtatatataattcttatcactattattttttttctttccaagttatcatcacta

SEQ ID NO: 29552 - DNA, 421 bp, Glycine max
ggaaagaaggttaagtgaaaagtgaaaagtgaaaatggacttggaagcagtgaagaggtacttagagaaaggaggagaaacagcatcggcggtggatgggttgcctccgaggtttctggaaccgttaataatgaacgctcttaaggtcgatctcatcgaaactggtcgcgttgtctgctccatgaagatacctccgcgtttactcaatgctgggaattcgttatacggtggcgccatcgctgctctggtcgacgtggtggggtccgctgcgattcccaccgttggatattcggctcccaatactggggtttctgttgagattaatgtttcgtatttggatgctgcctatgccgatgaggagattgagatcgaggccagggctttgcgtgtagggaaggcttgtgccggtataagcgtggag

SEQ ID NO: 29553 - DNA, 410 bp, Glycine max
gatcttgagaaatgcagaaccaagtgcttgaaagattgttcctgcatggcatataccaattctaatataagtggagcaggcagtggctgtgtcatgtggtttggtgatttattagacatcaaattgtatccagatccagaaagtgggcagcgtctatatataaggttacctccttcggaattagattctatcaggccccaggtgtctaaaataatgtatgtaatatccgttgctgcaactataggagttatacttgctatttattttctctacagaaggaaaatttatggtaaaattattcttctcttctctcacatttgacagaaaaaatagctgaatagttctgcacagaatattttaagtagaaattctgctgtttgtcaattcccttgacaagtgctgttattcaa

SEQ ID NO: 29554 - DNA, 412 bp, Glycine max
gatagaaaaaaataaaaaactttcgaaagaggttatccaattgaaattttaaaaatgactgggataaacttaagaattcaattattgaaattgaataagtaaacaatttaattggattggtcgaatggtatcaaaaaaatggagtactaactcccatttcttatttattattgaattaaccgatcaacttgctttgttatcgaacatttctttttgatttcaaaaattttccggaaaaaatttgaatctatttttatatgcgaatcaatcctactacttctggtcctgaggtttctgcgcttgaaaaaaaaaatctgggacgtatcgcccaaataattggtccggtactagatgtagcttttcccccaggtaagatgcctaatatttacaacgctctgatagttaagggtcg

SEQ ID NO: 29555 - DNA, 318 bp, Glycine max
gcttcactaccctgtctaacgctagcagtaggggtgattttaggggcatgctgagaattccaaataatctagataatcatgcctcctgtgatcatgcttgtatacgcctttagtgttcaagctctagtgttctacttaaatggaatattaacttccagatggcaatatctctcgaattcgatcattatactactacgcactcacactataccatagcactaaatcttggaaccactactcaacacattacccttatatacatatatcagacacagtaccattagaaactacatactaatgcagatacacatatacata

SEQ ID NO: 29556 - DNA, 300 bp, Glycine max
taccaaattcacggaggatgggggcttactttcatatgccagttctaacttaaactgatctgcctcttactatatcatatgatgttgttatttataatacatcaaaatttatcctgatccacaaatgtgatattgttcctatacaatggaatcatatctctaattttatcctaatagaacccaattactataataaatgtatgtactattctgttactcaactttactatatacacattgttattaattacttttctaatagaaattttttttcttaatttttcatctatatcatctaat

SEQ ID NO: 29557 - DNA, 365 bp, Glycine max
gattcaggagattgtggatcatgacagcgatgagaatgacaagcaggacagtgtttccaaccaagttaacattaataatagtgtgtcagctatggatcaagaggttgaacctaagggcttgccagctggtggagattatgcaaatgtgggacatgaggcaattgcccatgcttctactgtggagactatcattacggtcactgagagtgtagtaacagaagtagtggccagtggtgaggatacttatcgtgccgaaaagaataatgaggattcagcagcacagctggagaatgaggtgtcaaaggcgcagctggatggtgaggactcaaagccccaactggattatgacaccaagcccttgcatg

SEQ ID NO: 29558 - DNA, 410 bp, Glycine max
ggtacacacgagtaccacaaacctctgtctataaatctttctagaacgtttcttcactccccgaacctgatctcttgctggttgccacactacaccgatatttccaccaaacccgtttgcgttgttgtttgcgaataaatggcaactaagaggagcgtgggaacgttgaaggagggtgatttgaaggggaagagggtattcgtgagggtcgatctgaacgtgcctttggatgacaaccttaacatcaccgatgacactagagtccgtgctgctgttcccaccatcaagtacttgactggttatggtgctaaagtgatcctttctagccatttgggacgtccaaaaggtgtaacacctaaatacagtttgaagcctcttgtgccaaggctgtctcaacttcttggaattga

SEQ ID NO: 29559 - DNA, 416 bp, Glycine max
  modified_base (390)..(390): a, c, g, t, unknown, or other
gggaaatgaaagggaagagagaagaaaaagggctagagagcttgcggagatggctaagaaagctgtagaaggaggatcttctcacttcaacgtaacccagctaatacaagatatcatgcaacagtccaacaaagactagtactaacgatcatcttcggttatcaaaggcatattaatatatatacactatttcagaagaagttcctaattagcttgcagagggttgtaacatatactgtgtggcaagcctgtgaaggctcgaggaagaagagtatcctgtgtaaactcgagtgattactggaataaattaatcctactggaaacaaagaatggatataatcatatagactaaggatttgagggtgaaatataccttgagctaattgaagntttaattttatatgtttgatatcaag

SEQ ID NO: 29560 - DNA, 254 bp, Glycine max
ggaattattgtagcgtaaatgcaatcttatcaatgaaaaaaaagaatgcgatttaagaaaatttgagtttgatctctactggtattttgcagtgacaggggtttttgtttatacaatggggatgcaatgttctctgtttatttaagacgatataaactatcgaaacaagatagtgtgacgtgcacggtttaatataatgaatgggtccactttactcttaatgatttgatatgatataaaaagggcgaaacgta

SEQ ID NO: 29561 - DNA, 399 bp, Glycine max
ggaaacaagaagtgaggttgtctttcaaagatggaagaggaggcatttgaaaaaccattgttgaagagacagtatcatgagaactgtcctggttgtaaggtggatcaagccaaggagctcaaaaaggatgtttcctttagaaacctttcttatatatggttggcagtgttatgtggcacattgcctgtggcatcactctttccctttgtttatttcatggtgaaggattttaatattgcagaaacagaggaagacataagtacctatgctggatatgtgggatcagcaatgatgcttggaaggtctttgacgtccatattgtggggtatggtttctgaccgctatggtagaaaacctgttataattatagggattatcactgttggcattttaacacat

SEQ ID NO: 29562 - DNA, 407 bp, Glycine max
gatagaggtgcggattcttgtttttgttggagatctttctttctttgattccaccagcctcattgtcttagggtttttgtttccagcatagatgttgttgtcgatgattacttactagttttggtttgcttgattgaagatcaaggaaggaaggaaggaagatgttgggtgttataaggcacaagagtattcgccctgccttctccgcaatcagacacttgtcttctgcagctaaagagattactgtcagggaggctctgaactccgcactcgatgaggaaatgtcagctgatcctaaagtgttcttgatgggtgaagaggttggggaatatcagggtgcatacaagatatccaaggggctgctcgacaagtatggccccgagagggttctcgatactccaatcact

SEQ ID NO: 29563 - DNA, 350 bp, Glycine max
ggagcaagagtgaagagcgaagagaatggctcccaagggtttaatctttttggctgtgttatgcttctcagcactgtcactgagtcgttgtcttgcggaggataatggacttgttatgaacttctacaaggaatcatgccctcaggctgaagacatcatcaaagaacaagtcaagcttctctacaagcgccacaagaacactgctttctcctggctcagaaacatcttccatgactgtgctgttcagagttgtgatgcttcactgttgctggactccacaagaaggagcttgtctgagaaggaaacagatagaagctttgggttgagaaatttcaggtacattgagacca

SEQ ID NO: 29564 - DNA, 392 bp, Glycine max
ggttgattgggagtagcacgtatggttttaggggcatgctgtgaataccaaatatttagtgaatcatccagcctttgatcatttctctattgtatttagtgggcagctaatagctagctacttaaatgttatgttcacttctggttgacaatttcactaagaatttaaggtaggaatataatgtgttcactctatatcatagcactcaatcttgaaaccagtgctgaacagctgaccctaagaaacctatagcagccacaataccaaagaaagtacatagaatgcaaataatttatactacacatgtataaatgctcaaaaatataaaatacttcagcattaataatcataaatcatataaaaagccgataataattaatctaactaacaaa

SEQ ID NO: 29565 - DNA, 407 bp, Glycine max
ggagtcaaagggtgtgagtgagtgtgagcaagatgggttctttggcaaagaagggactcaacaattacgtcaaacagctccagcaacaccctttgagaaccaaggtaatcactgcaggggtactatcagcggtcagcgatgttgtgtctcagaaacttactgggatacagaaacttcaactcaaacgtcttcttttcaaagtgattttcggagctgcttatcttggaccctttggacacttttttcatttaatactggataaaattttcaaaggaaagagagattcaaaaactgtggccaagaaggttctgattgaacagttgacatctaatccttggaacaatttgcttttcatgatttactacggattagttgttgaaggccaaccttgggtgaatgtgaaagct

SEQ ID NO: 29566 - DNA, 406 bp, Glycine max
gaagtcaggatggcagaggtgaagcttcatggattttggtatagtccctacactttgagggtggtatggaccttaaagttaaaggatataccatatcaaaacatagaagaagaccgctacaataagagtcttcaacttcttgaatacaacccagtatacaagaaaactccagtgcttgtccataatggaaaacccttatgtgagtccatgcttattgttgaatacattgatgagatttggtcacataattcattacttcctgctgatccctacgagagagctctggcaaggttttgggttaaatatgctgatgatgacatggtaatttttaaaaacttaatcatgtagtactacttaaagtttctagcctttgatcttgatcaagagcacctgcatttatacaatt

SEQ ID NO: 29567 - DNA, 415 bp, Glycine max
aggacagctatcaggagtagcagtaggttcttctgtttgcatagcaagcattgtagccggaccaatatcagggggatcaatgaatccagcaaggacattaggtcctgcaattgcgacatcatactacaagggactttgggtatattttgttggacctattactggggcggttttagcagcttggtcttacaatgtgattagggacactgaacaccctggttttcccatttcactatcctccatttcatccaaggtgcgccaaagcattggtggaactgaacaaaaaagcgaccaaagatgcttggtgtgaatgaaataataaacaacaatgttttttctgacaccacaccaccgcccaaatcaacatcaccttcaatttcttgtcttggaggatctcaagtttccacatgtatta

SEQ ID NO: 29568 - DNA, 336 bp, Glycine max
gatgaggggcaggttcaggagttggaggagcaccgcattgagttgagtctcgggcaagataataatgttgagagggttgaagttgagaaggagcagggtggagaggagcagatgatggatgtgggttttgagcagtctaaggaggaggatatgcctggaatgtggcttttggatcagaagaactgtgtgggggagccatttttgcggccttgtcatggtggtgatgtgaagggtgtggagtttgaacaagtgagagaggacgatggagaagatgtgcaggaacaagaggaggtggaggaggaagaagaagaagaagatggtgaagaggatgggcat

SEQ ID NO: 29569 - DNA, 375 bp, Glycine max
ggcacaagtgagtttgttgatcgagataactagaaacagtgtgatgaaaatgaaggtccttgttttcttcgttgctacaattttggtagcatggcaatgccatgcgtacgatatgttccctctccgaatgaacactggctatggtgcccgtactccggaagtgaaatgcgcaagttggaagcttgctgtggaagcacacaacatctttggctttgagaccattcctgaagagtgcgttgaagcaacaaaggaatacatccatggcgaacaatatagatcagactccaaaacagttaaccaacaagcttacttttatgccagagacctcgaagtccatcccaaggacacatttgtgttcagtatagatggcaccgt

SEQ ID NO: 29570 - DNA, 377 bp, Glycine max
ggcacaagtgagtttgttgatcgacataactagaaacagtgtgatgaaaatgaaggtccttgttttcttcgttgctacaattttggtagcatggcaatgccatgcgtacgatatgttccctctccgaatgaacactggctatggtgcccgtactccggaggtgaaatgcgcaagttggaggcttgctgtggaagcacacaacatctttggctttgagaccattcctgaagagtgcgttgaagcaacaaaggaatacatccatggcgaacaatatagatcagactccaaaacagttaaccaacaagcttacttttatgccagagacctcgaagtccatcccaaggacacatttgtgttcagtatagatggcaccgtac

SEQ ID NO: 29571 - DNA, 412 bp, Glycine max
gaggtgcaagttgagattttgattgttgttgggctcccaaattcccaaaacagtgatgatcttaagtaaaagaaatgtttttggcaccaagggaaaaatgggtatagatttcatgattttggtgttaacattgtcatggttttgtctgactactatatgcgtctcagctacaaaacaagcatacccaccaacaccacaaccgaaccagaacctaaggtttgaccaaaatggagaattcaagatattgcaggtggcagatatgcactatgcaaatggcaagaccacgcattgcttgaatgtgctcccttcccagaatttttcttgctctgacctcaacaccactatctttcttaacagaatgatcaaagcggagaaacccaatcttattgtcttcactggagataatatcttt

SEQ ID NO: 29572 - DNA, 367 bp, Glycine max
gggacttagacctggagatgtaaatgatggcatgcatccaatgcacagtgaggctgctcttggaggtggaaacagcggtggtccaccttcggctactggtccaaacgatgcacgtggtggaagcaagcaagatgcctctgaggctggaacagctggtggagacggccaaggcagctccgcggctgctcataacagtggagatggtgaagaggcaaagtgacatgtttttatgtgcttttcatgagatacatatgactgttgatagtaggttttcttaaaagggtaggactagtgtgatctgatgacctttgataggtcgaccaaaggacacaagggcttctcttgtttgatagcttaagtagttgtg

SEQ ID NO: 29573 - DNA, 408 bp, Glycine max
ggccagctgttcgaccatattggtttcactttggtcttcttcaccctgttagggtttgcatcagattcccccaattcttgtttgattttgcgctttcactagtttttcttcgacatgactcaagatctcgagatgagggatcgctcaacgccttccaactctgtttctttgcctgctccatctactttgcagcatttgaaggagatagcgtctcttatcgagaccggttcgtactcgaaggaagttcgtagaattgctcgcgctgttcgccttacaattgcgttgaggcggaaattgacagcatccgctatctcttcttttctcgaccttgttctcactccaggctctgaagttcacgccaaattgtctgcgtatcttcccaaggaggatgatcatgagatggaagtg

SEQ ID NO: 29574 - DNA, 412 bp, Glycine max
ggatcgagtatgttttctggtttctttcgtcatgctctgagtattctcttgctctttaacttgatcttggttttcttcggactagtagtacgccatccatatgcttaaatcatgtttagcttgccaacatatttcagctttcttcctaaatctgctctttttttctcacattcagcttattgcttacgatttggaatagtgacaagtaaagacaaatcacaactcacggtcatccaattccaagaatagaggtttgttcctttctttatagcttattatattgcctacttcttttgctcatttatttaagatttgaagaaatttcactcataaagatggatatataaagttctcgtttagatctttcaactctcatggctaatttgtagctctttaacaaaattttgacaaa

SEQ ID NO: 29575 - DNA, 413 bp, Glycine max
ggagaggagaggtgcggcgatggcttttgcagttacgcccaagataataacggtgtcattcgataagcaaaaccaaaggaggagtttcgaaggattgtttgggaaaaggtatcgggtaagggtgaagcgaagtcaagatcattcagtgaagtgtggtattgagcgaagcagcagcgatggaaagaaagggtgcggaggaggaggcgtgtcgaattcgaactacgtggtgccgctggacaacatggcgaactcatcctgcataacacgtgctttagccgagatactcagggacctcaataaaagaatcccggatactatcgtcaaacatgatcgcttcatacgctggtatcatgccaacaggatgctcagtctctaccccccaagttggtgtggcgagatacgtgatggcattt

SEQ ID NO: 29576 - DNA, 403 bp, Glycine max
ggaggattaccgtggcaagaggaggaaggatgaggaatatcttaggagggagcatattgacaaagaagaagttctgcatggctacagggaaaatgctagtcggcgcaggcgagaaagagatgaagtattggatccacgaaagagggatgacctgcaaagagctagagataaccctgatgatcaatatgctactaggcagaaagatgatgcctgggtaccaagggagaggggtgataggcagagagatagggaggagtggcatcggatgaaacagtcccatgaagaacacctacccaagcgtgaaagagaagaaggacgaagttctgtaagaagtggacgaggggctgaacataaactttctgagaaagaataccaatccagagaagcaatgcggcaaaatgac

SEQ ID NO: 29577 - DNA, 404 bp, Glycine max
gaagctgaacgtggatggttcacgcgacccatacaaaagttcctccgctggttgtggtggtgttctgagggacgcatcagcaaagtggctccgtggctttgctaaaaaactgaaccctacttatgcagtgcaccagacagagttagaagccattctcacgggcttgaaggtggcttcagagatgaatgttaagaaactaattgtggagtcagacagtgactctgtggtgagcatggtggagaatggggttaagcccaatcaccctgactatggtgtcgtggaacttataaggacgaagcggcgtcgttttgactgggaagtgaggtttgtttctgtctccaacaaggcgaatcgtgtggctgataggctcgccaacgatgctcggaaattggcttgtgatgatg

SEQ ID NO: 29578 - DNA, 407 bp, Glycine max
ggagccttcaaaaggaaatacacacttattttcatgtatatattttgctatcttaactgttttcaaaaatgttactacatttgtgctcctttgtaggtattacctgataaaccagaaggcagagcctcttagttgttcaaagcagctctacattctattgatggcattaccataggttccttagatgatgtctccctgctggacctgtgacttcatttttcagatctgtcaggaacacccttgattttgacttcgaagatgacaatgaaggtcgttggcaatctactgagcctccatcactctacatattcattaactgcagtacacgtgaacttgcgtatatagagaagtatgtgtgcagatttaggccttccgggcttcccagccaaagatttgcagtaccgctt

SEQ ID NO: 29579 - DNA, 413 bp, Glycine max
ggaacaagagatcactagcctaagaagccaaattgaaggacttcaaatgagggaattggccttgcgtttgcagtttgagctgtattgtgaaatgaaggaacaagaatctttgcttctagatgtcaaaaacatgttgtctttggagaatgatcgcgctgagttcttgagtaaagagatttcgtcgatagagaccgagactaagaggttggggagttttgtagtccaatacatgagtgttgttgaagagcatcaatattggaaatcacagaatagggtgcttcaaaagagggttcaaaggctacttagggactcaaaggccaaatctcgtttgataaagtgtcaggctttgaagatcaaagagaaagaagaagagatattgagaaaccatgatgccttgcaaacaagggtatgtg

SEQ ID NO: 29580 - DNA, 142 bp, Glycine max
gaagaaagctgctagcagagggaagttctacacttttttgtttggattgatcgagtgtactttttcttttcgagattggcttggtgtgcagtggaaagagggtggaaaagagtggtaagggggagggcggcgccccttgaac

SEQ ID NO: 29581 - DNA, 415 bp, Glycine max
gggagcaagagagagcaagagagagagagaaggtttggaagaatcgcgatggagggtgaggaaggaggaggcataaggctgagcaagcgaatcgcaaacggagaggttgactacaagacgaaatccggcaccgcctggagccactcctatctcaaccagaagccatggcaccctctttcttaccccaaccaacgccgcaagtggatcgccgaacagacccacgccaatcgccaacgccgcaccgaagaggtttctcgcgagttcgctcaggagcaagagttctttcgccaaaccggtcttatcttccaaaaaaaaaaagaaaaggtggagctcatgcaagctgttagtttcatgtacgttcgtcctccgggctacaacgccgagagtgccaaagctgctgaaatgaacgacgaga

SEQ ID NO: 29582 - DNA, 373 bp, Glycine max
gggtggtgaggtgagaagataaagaaagaatggcatttgcaggaacaacacagaagtgtatggcctgtgacaaaaccgtttatctggttgataagttgaccgcggataaccgagttttccacaaagcttgcttcagatgccatcactgcaaaggaaccctcaagctgagcaactacaactcttttgagggagttctttattgtaagccacactttgaccaactgttcaaaagaacagggagccttgacaaaagctttgaaggaacaccaaatattgccaagccagagaaaaatttggaagagaaacctgcagcagccaaagtctcaagtatgtttggaggaacaagggacaaatgtgctggttgtcagaaaac

SEQ ID NO: 29583 - DNA, 300 bp, Glycine max
tccgaaagggcaacaaaaaggttgggtgatggggcccattgattccgagaaggaaagaaacgatgtctgcgccacaacagctatactctcgcgcgaacaccgatgaattcgacctcgaatcaggagaaaccctctacccacagctgagcggctgcaaaaaccatctccgatggggttccatccggctggtctactgcatccttttcgagcaaatcgttcttagcacgctagtcttcgacaccaccgttttatatactccaatcaatgacctactcattggcagttccaccctacttctca

SEQ ID NO: 29584 - DNA, 409 bp, Glycine max
gtagcactaatgataagaataatttcaacaatgaacagcatgtggttgtggatgaccacaacaacactagagtagcatctaatcagggagagaatggatctcaagaagtagatcctcagattaggcaaaatagtacttcacaggatttgccagaaccacattcacaaagagataaaatgtataaagctgtttatagaagatcaagatctcatagggctgtgactaatttagctgacagtagtggccagggagaattcaattcaaatgggagaaacagtaatttcaatgctacagcaaacttcagcaatggcacaaatgaagctattcatacaaatggatccttagagttggaaccaaccacttgtgatccaaattatgagcggaataatctcaaagtgctgcaaggacc

SEQ ID NO: 29585 - DNA, 400 bp, Glycine max
ggacaagagtgtgaactgcagagggcttctccagcctagtttgttctcagatcttcttcttccatggaccagtacgagaaggtggagaagataggcgagggaacatacggcgtcgtttacaaggctcgcgaccgcgccaccaatgagacaatcgctctgaagaagattcgcctcgagcaggaggacgaaggcgttcccagcaccgccattcgcgagatttctcttctcaaagagatgcagcataggaacattgttaggttgcaggatgtagtgcacagtgagaagcgattgtatctggtttttgagtatctggacttggatctaaaaaaacacatggattcatctccagagtttgtgaaagatccgcggcaagtaaagatgttcctttatcaaattctct

SEQ ID NO: 29586 - DNA, 437 bp, Glycine max
cccacgcgtccgcggacgcgtgcagacgactgaaagaggacaacagtgtgaactgcaaagggctgctccagcctagtttgttctcagatcttcttcttacatggaccacttccagacggtggcgaacataggcgaaggaacatactgcgtcacttacaaggctcgcgaccgcgccaccaatgagacaatcgctctgaagaagattcgcctcgagcaggatgactaaggcgttcccagcaccgccattcgcgagatttctcttctcaaagagatgcagcatacgaacattgttaggttgcaggatgtagtgcacagtgagaagcgattgtatctggtttttgagtatctggacttggatctaaaaaaacacatggattcatctccagagtttgtgaaagatccgcggcaagtaaagatgttcctttatcaaattctct

SEQ ID NO: 29587 - DNA, 380 bp, Glycine max
gatgacgagagtgacaacgaccatgaggacggtgaagggaagcatccacatgaaacaagcccacgtaaatttgatgacttccttaccaaggtgcacaatgaatctaaccgtagtccaccaaggttctccgatcacgtgacttcacctgattggtgccactcctcgcagccaaaaccttacaatgtcggatatgctgactacggatccaacaagccacttggaggtgccaataaacatgatggttctggatatggcatcaacaacgaagggatcaagcctttatatggaggtaacactaaaatttttgataaccatcatgcttatacaagttctttctagatgaaccactttgatcatgcttatcatggatacatccaaaa

SEQ ID NO: 29588 - DNA, 386 bp, Glycine max
ggtgaccgggcgctgggtgcttctcttctctgcagcctctttgatctgttggtgctcacttcgatcccgttgtgccctcttcagtttaggtgttttcattttagtgatattgttgaactgaacatactctgcccagttctcagcttaaagcatggatccggaggctgcacgaactgcacgagaatctctagacctggcattccatatgtccaatatacttgatactggtctagaccgtcacacactttctgttcttatagcactttgtgatcttggagtcaatcctgaagcgcttgctgctgttgtcaaggaactaagaaaagagaaaccctcactatcatcatcacttcccgtagctccttttttgccataaataaatggatttt

SEQ ID NO: 29589 - DNA, 260 bp, Glycine max
acgcgtccgaacacgcctgagaacgcttgcgaaccgtctacagaggaaggggaacggacaatatctgaggagggcggatattgccaaatataaaggtcagcatgcatacagataacatgctagtctgttcattctagaaaaacatataatattgcaaccactaaacatggataacctctgcatagctattaaactacctgacgaacactatattattatgcacaaacatcatgtcttagtaccaagttagaaaagtgata

SEQ ID NO: 29590 - DNA, 412 bp, Glycine max
ggagattagggtgagtgatgcgaaactggctaaaacagaaacaaatccaattacgaagaagaagaagaagaaggggtttgagcctgaaagaacataacagtgggactgtgggagttggggactcgtttgccaagttgcttctcttctatctccgtgcttctggatgatcaaaattacagcattattattattattgaagtgatttttgcaggtttgcccaaaaatggaatcggtgccaaacccaaacaacggggaggaacccacttcgtgggatgagctatacaacatcaatttgatgccttcagagttatttctcaagttccgaaaagaacttcagggcattcgagttggtctcaatatggagttctataatgccccggtcaatgaatatcaagcaaagcttgtattgaag

SEQ ID NO: 29591 - DNA, 401 bp, Glycine max
accggtgccagagacaccacagagggaaccacgagagggctgttactggtgccgccgatggaagagacagtgtttgtcagattcacgctaagccaagacatatgggctatcctgctcgatacctgtatattcaagttttatagtagatgtctcttgcctcaagatttgcccgagtgacaactctaccactttgaggagaaaaccatagtaatggatatactaccatagacaggaggacccatatgcagactaaccttgatcaccctaagaagagcttcaatgttgaggaatatacctctgatgacagtcctgtagccttggattgttacgaatgtgataacttatcactagtatggggaaaaccagtgcagctccgtataggttctggagagtggattacc

SEQ ID NO: 29592 - DNA, 410 bp, Glycine max
ggttctagtgtgtgattgtttgttgttgtaactggttcttcttcttttgttgttctgtgtttgtgtttgttttttctctcacctgaaaatgtcttgctgcggtggtaactgtggttgcggaagctcctgcaagtgcggcaacggctgcggaggctgcaagatgtacccagacttgagctacactgagtcaaccaccaccgagaccttggtcatgggagtggcacctgttaaggctcaatttgagggtgctgaaatgggtgtgcccgctgagaacgatggctgcaaatgtggaccaaactgctcctgcaacccctgcacttgcaagtgaggtgttgggagagcaagcttcaagcagagatagcccttaattaggaataatgataaactattaatgtgtagctaaaaactta

SEQ ID NO: 29593 - DNA, 105 bp, Glycine max
ggttctagtgtgtgattgtttgttgttgtaactcgttcttcttcttttgttgttctgtgtttgtgtttgttttttctctcacctgaaaatgtcttgctgcggtgg

SEQ ID NO: 29594 - DNA, 327 bp, Glycine max
gaaggcataggtaggcacaagcacaatcatgagttggtgcggactgaatggtgtgtcgcgttgttgacattaaaatttgatcgatttggggttggggcggaagaaagtggaaacgacgccgttggaaagtgggaagaagatgaattcgcagcaaatgcagatgcaaattcaaatccaaaacagtggtggtggcagtggcaacaacaacagcagcaacattccagtgagcgaggttttctggactctcgtcgacaaaaccgacaaaaaattcttcaaaatcagagacctttccttttaccaacgcagcaggcatgatacttactttta

SEQ ID NO: 29595 - DNA, 401 bp, Glycine max
  modified_base (363)..(363): a, c, g, t, unknown, or other
gggacgacatggagaagatctggcatcacactttctacaacgagcttcgtgcggctcctgaggaacaccctgtgcttctcaccgaggcacctcttaatcctaaggctaatcgtgagaaaatgactcagatcatgtttgagaccttcaacacccctgctatgtatgtcgctatccaggccgtgctttccctttatgctagtggccgtacaactggtattgttctagactctggagatggtgtcagtcacacggttcctatctacgaaggttatgccctcccacatgcaatcctgcgtttggaccttgcagggcgtgatctcactgatgccctcatgaaaatcttgactgagcgtggttacactntcaccacatctgcggaacgggaaattgtgagggacatg

SEQ ID NO: 29596 - DNA, 408 bp, Glycine max
ggtgtgagttcattaacatatacaaattctctgtgttgtgttgtgtacttgtgttaattgtgttgttgttgtaggaaatttaagtgaagagagaatgatgatgaagtctgctatgtgtgcattggtgcttgtggcactggttgtggttgaagtggggcccatggctgaggctgcggtgacttgcaacccaacacagttgactccttgtcttccggcaattaattcaggttctgcaccttcgagtgcttgttgccagaagctgaaggagcaaaagccatgcttctgtggctacctcaaaaaccctagcttgaagcagtatgttaactctcctaatgccaaaaaaaccgttagttcttgtggtattgcctatccaacttgttaagcacctcttatatatatatataaaat

SEQ ID NO: 29597 - DNA, 416 bp, Glycine max
gggtacgagaggaggattttctcgcacccaaaaccagcatgtgaaatcgaaaagggctcttcgttgaatttgctgttcataaaacccttctccgacaacttgtagctgctgctgctgtttctctttcattttttttttgctaaggactcaaggaatacaacatcctgatatttggaggacagattaaagagaaacatcgtggaggaaacaatggtagcaaggtattggtgtcacatgtgctctcaaatggtcaatcccatcatggatatggaaatcagatgcccgttttgccaaagtggatttgttgaagaaatgggtaacacccccagtagcagcagcattcccaatacatcagaatctgattttgaatctgatcgggctctctcccttgggcgcccatcttgctaggcatgatg

SEQ ID NO: 29598 - DNA, 400 bp, Glycine max
aacgatggtcaagatgagtctcaaggtgctcaggataagaaaggtgttgagactgatggagatggagaaaagaaagaaaatgtccctgcagaatccaaaacttccaagaagaagaagaagaaggataaagcttccaaggaggtgaaagaatctcaagatcaacccaacagttcagacacaaacaatgggcctgatttggccacaggcgctgaaaatgtggaggatacatctactgttgatgtgaaagagcgtctcaagaaagttgcttctacaaagaagaagaagtccagtaaagaaatggatgctgctgcaagagctgctgctcaagaggctgctgcaaggagtgcaaggcttgctgctgcaaaaaaaaaagagaagaaccattataaccagcaacccg

SEQ ID NO: 29599 - DNA, 395 bp, Glycine max
gtatttcctgagcacaagtatgagatcgtgaagcgcttgcaagctaggaaacatatttgtggaatgactggtgatggagtgaacgatgcacctgccctcaagaaagcagacattggtatagctgttgctgatgctactgatgcagctcgcagtgcatctgatattgttctaacagaacctggacttagtgttattattagtgctgttttgacaagccgagcaatcttccagagaatgaaaaattatacaatttatgcagtatcaattacaatacgtattgtgcttggtttcatgttgctggctctcatttggaagtttgactttccaccctttatggtgcttattatcgctatcctaaatgatggtactattatgacaatttcaaaagatcgtgt

SEQ ID NO: 29600 - DNA, 400 bp, Glycine max
gtagcacaaacatactcccgcgaacaccagggtgaaagtgatctttttgatcatctatttgagctgttaaactcttccatccataatgacgaaagtttcccaaaggagttagcatcctgcacaggagctctgcagacgtctgttagtcaacacatggctaaggaagaggagcaggtatttccactgcttcttgagaagttctctcttgaggaacaggcatctttagtttggcagtttctctgcagtattcctgtgaatatgatgacagaatttcttccatggctttcaacatctatatcacctgatgaatcgcaggatttgcggaagtgcttaagcaagatagtgccagaggaaaagcttcttcaaaaggttgttttcacctggatggaagggggaagta

SEQ ID NO: 29601 - DNA, 383 bp, Glycine max
gggtacgagaggaggattttctcgcacccaagaccagcatgtgaaatcgaaaagggctcttcgttgaatttgctgttcataaaacccttctccgacaacttgtatctgctgctgtacttcttctataacgtggttacaccgtacatgccaccgtccaagatatcaaggatgaacatgagacgaaacatttggaggaaatggaaggagcaaagagtcatctccattttttagaaatggatcttcttgacatcgactccattgccgctgccatatagggttgctccggcgtaatccaccttgcatgtcctaacatcattggtcaagtcgaagatcccgacaaacagatattggaaccggcgattaaaggaactgctaatgtgttg

SEQ ID NO: 29602 - DNA, 329 bp, Glycine max
gttgaaacaaatgagtgtgaataaggagacctgagagttctgttgagccggtgtgttcatcatacaaaaaaaaacccagcaacaatgggaggcacttctgcagatcttcaccaccatgaatcagatatagaactcactgatgctgaaaggactgacactaaattaggggcttctgattcaaaagctgtcaatgatgttggacttgactgtggcaccaaattccattctgaatctgaaagacaacactacctgtaggtgaccatgtacatttcatcgggactgtggggcattacacagtgttaaaactgttttatacggtgtttacatgg

SEQ ID NO: 29603 - DNA, 396 bp, Glycine max
ggcagcaaaccccttcaacatttttcaccctcagaattcatatcatgagttttcatgatacatcaaacacggggcttggacttggtcttggtcttggacttgttagcttccatgatcaatcagagaattgcatgaagagtactaatgatcccttgagagaaatccataagataaaaaaggtggagaatccatcaaaatgtaacagcacatacccttcacttacattaggaccaccagatgatgatgatgatgatgatgatgaagtgaataatcaaccaccaagttcaaaaactgagtcctatgaatattttcgtccccatgtttcttctcctagtgcggtgtcttcattttccaactattctagcatcaagagggaaagagatcaggttttgtggg

SEQ ID NO: 29604 - DNA, 409 bp, Glycine max
ggagcatctgataatcttcgtgaatgggggaaggacaaagtccggtttgatcgaaatggtcctgctgccataaccaagtatcaagctgataacgctattccggggaagaatgatggatgcaatccgatcggtccaacaccacacaccttgcaagagctgcaagacacaaccttgggttctctcttgtcagcactcatgcagcactgtgatcctcctcagaggcgttatccattggagaagggcgttcctccaccatggtggcctaatggtaatgaagagtggtggccccaaataggtttgcctaaagatcaaggtcctccaccttacaagaaacctcatgacctgaagaaggcatggaaagttggtgttcttgactgcagttatcaagcacatgtctcctgatatcgca

SEQ ID NO: 29605 - DNA, 194 bp, Glycine max
ggttgctaaggggaatcccttttatgaagtgttctcatatgtcttatctgtttgttcagtgtctcccttgaacttgtgctttgcatctctggtttaagtgctgctgtttattatgttttaaaatgatgtattgaactcgtttcagcgaaagtatgttgtttatgtttttattttaaatatcaatatcgtttcat

SEQ ID NO: 29606 - DNA, 194 bp, Glycine max
ggttgctaaggggaatcccttttatggagtgttgtcatatgtcttatctgtttgttcagtgtctcccttgaacttgtgctttgcatctctggtttaagtgctgctgtttattatgttttaaaatgatgtattgaactcgtttcagcgaaagtatgttgtttatgtttttattttaaatatcaatatcgtttcat

SEQ ID NO: 29607 - DNA, 339 bp, Glycine max
gacactaaacacgtttaaagaagagcatcaggggactaacaaagcaaccctatgtcgaacgtggtttgagtcaccggagccagcggcgccatcggatcatgggtggtactactcctcctacaacgtggttacaccgtacatgccaccgtccaagatatcaaggatgaacatgagacgaaacatttggaggaaatggaaggagcaaagagtcatctccattttttagaaatggatcttcttgacatcgactccattgccgctgccataaagggttgctccggcgtaatccaccttgcatgtcctaacatcattggtcaagtcgaagatcccgacaaacag

SEQ ID NO: 29608 - DNA, 406 bp, Glycine max
gggtgaagtgagtagtgaaggtgctgaatcgaatcgaatctccgaagatggccgcgagcgatcgcacagtgttgcaattctcttcatcatcttcttcttcgcagagcttgtccgcgaaggtccaccctctggtcatcttcaacatctgcgattgctacgttcgacgccctgaccaagccgatcgcgtcatcggaaccctactcggctccgtccttcccgatggaaccgtcgatatccgcaattcctatgctgttcctcacaacgaatctatcgaacaggttgcgttggatatagagtaccaccacaatatgttaatatcccaccaaaaagtgaatccaaaggaaatcatagtaggatggtattcaaccggtcttggagtaacaggtggtagtgcattaattcacga

SEQ ID NO: 29609 - DNA, 415 bp, Glycine max
ggagagaaagtgagagagaattacagagcattgtccaacacgattacacgaccgaatcaaacccctctttctctccgaagctgcttttaatatcgtactggccttcgattgttctcctctttaatacatactgttctctcttcgatttgagggaacagtacaagagtctgagcatcggttaacccaactgcacaggtagtctccaaataatggagcctcatgatgagactggatgccaggctcctgaacgccccattctttgcattaataattgtggcttctttggaagagcagctaccatgaacatgtgttccaagtgttacaaggacatgctgttgaagcaggagcaggacaaatttgcagcatcatccgttgaaaacattgtgaatggcagttccaatggcaatggaaagca

SEQ ID NO: 29610 - DNA, 408 bp, Glycine max
tcgtgcagatgaaattagtaaaattatccgtgaacgcattgagcaatataatacggaagtaaaaattgtaaatacgggtaccgtacttcaagtaggcgacggtattgctcgtatttatggtcttgatgaagtaatggcgggtgaattagtggaatttgaagagggtactataggcattgctttgaatttggaatccaaaaatgttggtgttgtattaatgggtgatggtttgatgatacaagagggaagttcagtaaaagcaacaggaagaattgctcagatacctgtaagtgaggcttatttgggtcgtgttataaatgccctggctaaaccaattgatggtcgaggagaaatttcagcttcggaatctcgattaatcgaatctcctgctcccggtattatttcgag

SEQ ID NO: 29611 - DNA, 399 bp, Glycine max
  modified_base (367)..(367): a, c, g, t, unknown, or other
gacattggtgacaaagttagaaacaaggagaaagaaagaagatggcaggaaagaaaatcccagatgtgttgctgaattcaggacacaaaatgccagttataggcatgggaacttcagtggagaatcgtccatcaaatgagacccttgcttctatctatgttgaagccattgaggtgggttaccgtcattttgacactgctgcagtgtatggaacagaggaagccataggcctagccgtggccaaagccatagacaaaggccttataaagagtagagatgaagttttcatcacttcaaagccttggaacacagatgcacaccgtgaccttattgtcccagctcttaagaccacattaaagaagctggngacggagtatgtggatctttatctgattcatt

SEQ ID NO: 29612 - DNA, 402 bp, Glycine max
gggtgcaaaatctgataatggcagaaacagaagacaaaacccttcaagcctcgcccatgaacgaaaccaagaagatgaagaagaataagaataagaagaagagcgacaaaaaaagacctcgggagattgctaccgaggagcgtccagaggaagaggagaatgagaataatacagatagcgatggagaatcctcgaagaagaagaggaagaagaaggtggaaggagaaagtgaagtgaaagagaaaaaggtgaagaacaatggtggctctggaattatgagcactgagtcatttgaatctctcggattgtctgaacctacttataaagccattatggatatgggattccaccacatgactcagattcaagcgagggcaattccaccgcttttgattggaaaag

SEQ ID NO: 29613 - DNA, 383 bp, Glycine max
ggggtcgaagggcaatacctccaaacaaaatcacttttgttgaagcttctcatcttcccttcatttatctttctctttaacccaatttgattatctgtctctctctctctctctactattcagcctctattgctctttccttctcttcttagccttggagctggttgatggatattgaacccttgtgggctattggggggtggtcttttctttcaaattattgcatggcagaacctaaaacattatcatcatcatcaccaatctcagaacctttctcaaaatcaccctcttttctttacttactctcacttttcttcatcctcctccttctcatcaacctatcccaccaaccacacccttctaccatggcctattcagaaaaa

SEQ ID NO: 29614 - DNA, 349 bp, Glycine max
gacagcaaatgccaaaagccaagttaattccctttctcgactctgcacaaacacaaacacacgtattctcttgcaaaactaagaatgaaggaggagttggtggttgaagaagggtaccttttcaaagaagagactcacttcacagtgctcaaaacctctctcttcttcaacggtgatggcttcgctgtctacgattgcaaaggccaactcgttttccgcttcgactcctacggtccccgcgcgcgtgacaaggacgagctcgttctcatggatccccatggccgttctcttctcactctccgccgaaagaaaccgagtcttcatcaacgctgggaaggcttaaagggga

SEQ ID NO: 29615 - DNA, 393 bp, Glycine max
gagtgtagttaattgaaagaggggctaaaagaacaatgcgattctcaaaagcttccttctacactcttcttctccgcaaacctcataaccatcaccatcaaaactacgtcgttttatcgcggcgtcgcgtagtgaccttggcagtgggtgtgttgatcttgctgagtgctctctacattttctggccatcgggtcctgatctgaagatcgtggggctgaaactgaggcgcataaaggtgcaccctgtgccgccaatcaccatagacatctccatgcttctcacgctgagggtgcacaacgttgacgtctacttcatggacttcggagcggttaacgtcgccgtcgcctacagggggaagatgctgggccacgtgacgtccatgcgcatgcacg

SEQ ID NO: 29616 - DNA, 343 bp, Glycine max
tacttaatgggagtgtacttaatttaaagagaagctaaaataacaatgcgattctcaaaaacttccttctacactcttcttctccgcaaacctcataaccatcaccatcaaaactacttcgttttatcgcggcgtcgcgtattgaccttggcagtgagtgtgttgatcttgctgagtgctctctacattttctggccatcgggtcctgatctgaagatcgtggggctgaaacttatgcgcataaaggtgcaccctgtgccgcctatcaccatagacatcttcattcttcttacactgatggtgcacaactttgacgtctacttcatggacttcgtaacggtta

SEQ ID NO: 29617 - DNA, 413 bp, Glycine max
ggaggtgaaggggaaaaaaaaaagagtggagtggagaatggcttcgttatcgctttgcatagccatgagagcacccactccctcagcttctctcattctcactaccccaaaaccatcttcactctctttgaaccttacccgcacttgctccagcgctcgctctccgctcctccattgctccttcctctcttctccttcccatctctcttccccttcctccgtttcaggcttgtcacttggattggatttgacatctaatgttgggaccagaagaggaaaaggttctggcctatttgtgagggcaggcaaggctgctctttgtctgactaagagaagcagatcaagaaaatcattgtcacgcactcatggtttccgcaaaagaatgagcacaccacgtggaagagctgttttaa

SEQ ID NO: 29618 - DNA, 408 bp, Glycine max
gactcgcagttgtattgttgaacaagggtttgtctgtctgcttcttcactttctctcgtttcaatcgaaaccaaaacaaaaacatgggcagaaaattcttcgtcggtggcaactggaaatgcaatgggaccactgaggaggtaaagaagattgttactactttgaatgaggctaaagtccctggagaagatgtcgtagaagttgttgtgagccctccttttgtgttccttcctgttgtaaaaagtttgctgcgccctgatttccatgtttcggcacaaaactgttgggttcgcaaaggtggtgcttataccggtgaggttagtgctgaaatgcttgttaatttgggaattccttgggttattattggtcactctgaacggaggcagcttttaaatgaatcaaacgagt

SEQ ID NO: 29619 - DNA, 403 bp, Glycine max
gacacacaacatttacatttctctctccaggatgggttctactcacaatgagttttatgcacttatgctagtggtggtggttggctccatggtggcttcctgtggtgctaacttcaaccaagactttgatctaacatggggtgatcaccgtgctaagatattcaatggtggtcagcttctatctctttctctggacaaagtctctggctccggcttccaatccaagaaagagtacctatttgggaggatcgatatgcaactcaagctcgttgctggcaactctgccggcactgtcactgcttactacttgtcgtctcaagggccaactcatgatgagattgattttgaattcttgggaaacgtgagcggtgacccttacattctccacacaaacgtgtttacc

SEQ ID NO: 29620 - DNA, 395 bp, Glycine max
gtacatacagtggggttttatcagatggttcaaaagtcgcagttaagagattaaagaggtcaagctttcagaggaaaaaggagttctattctgaaattagcagggttgctcggcttcgtcatcctaatctggtggctgtgatgggatgctgctatgatcatggtgaccgctacattgtttatgagtttgtagctaatgggcccttagataaatggctacatcatataccaaggggaggtcgcaacttagattgggctatgaggatgaaaattgcaactacgcttgctcaaggaattgcgtttctgcacgacaaggttaagccacatgttgtgcatcgagatatacgtgctagcaatgttctgctggatgaggagtttggagcacagcttatgggt

SEQ ID NO: 29621 - DNA, 417 bp, Glycine max
ggtggtagtgtggcagcgacacgtatcaactgcaataatcgcatcgcagaagcagtttccggtgcatctcatcgtctccgaaaatgaacgacgcagatgtctcgaagcaaatccagcagatggtgcggttcatccgccaggaagctgaggaaaaggcccacgagatctctgtctccgccgaagaggaattcaatatcgagaagctgcagttggtcgaagccgacaagaagaagatcaggcaagaatacgaacgcaaagagcgccaagttgaaattcgcaagaagattgagtactcaatgcagctgaatgcttctcggattaaagttcttcaagctcaagatgacgtgatcagttccatgaaagaagctgcatccaaggaacttttgactgtgagtcatcatcatgatgatcatgtgt

SEQ ID NO: 29622 - DNA, 409 bp, Glycine max
ggctattcattcattcattcctccttctctctgatcgcaaactgcacctctacgctccactcttctcattttctcttcctttctcgcttctcagatccaactcctcagataacacaagaccaaacccgctttttctgcatttctagactagacgttctaccggagaagcgaccttagaaattcattatggtggcaacagctgctacttcatcatttttccctgttacttcaccctcgccggactctggtggagcaggcagcaaacttggtggtgggcctgcaaaccttggaggactaaaatccaaatctgcgtcttctggtggcttgaaggcaaaggcgcaagccccttcgaaaattaatggaaccacagctgttacatctaaagaaagcttcaagcatgatgatgatc

SEQ ID NO: 29623 - DNA, 402 bp, Glycine max
ggaaagtgttgtggagacaaaaccacaatacagttttagaatggagaagacagcagttaaagttcgatgccagaggattgggtgcgacgccatgttctccgaggccgacaaccccgacggttcctgtcgataccatgattcgggacctatatttcatgatggaacaaaagaatggagttgttgcaagaaaagaagtcatgattttagcttgtttttggaaattccaggatgcaagacaggaaaacatacaacagttaagcaagttattacaccagtggaagaagaacaccatgccctctccaactgctgtttcttctaccaatgcatcatcaaaggagtcttgtcccagatgtcggcagggtttcttttgctcaaatcacggctcgcaaagcaaacctgtaa

SEQ ID NO: 29624 - DNA, 410 bp, Glycine max
ggatctaaattcttcagcagacacactttccgagaagacggatgaaaattcagttaaaattcgaagagtattcaatgatgtgcgtctagctctgtatgttgtggcagctgtgatgcttcttctggctcttgttggacttgtcctgtctgtccttggatatcaacatgcaatcctcatatttgttatcaccggatggttactggttgcaaccacattcgttctttgtggagtattcataattcttaataacgcaatttctgatacctgtgtggctatgggagaatgggtagcaaatccacacactgaatctgcactaagtaatgtcctcccatgtgttgatcagagaaccacaaacaaaacactctttcagagtaaacaagtgatcaacaatattgcgaatgttgtcaata

SEQ ID NO: 29625 - DNA, 383 bp, Glycine max
ggaggtagagagctctgacacaattgacaatgtgaaggcaaagatccaagacaaggagggtattcctccagaccagcaaaggttgatttttgcgggaaagcagcttgaagatggacgtacgctggcagactacaacattcaaaaggagtctacccttcaccttgtccttcgtctgaggggaggtatgcagatctttgtgaagactttgacagggaaaactatcaccttggaggttgaaagttcagacacaattgataatgtcaaggcaaaaatacaggacaaggaaggtatccccccagaccaacagaggttgatctttgctgggaagcaactggaggatggaaggactcttgctgactacaacattcagaaagagtctactc

SEQ ID NO: 29626 - DNA, 415 bp, Glycine max
ggaccaaagaggagacggatcaactatttgacggaggtgagagatttgatctccgatttattgtaatagctgataggtttccatcctctcggactgtagaggaattaaaggatagatattatagtgtttcccgggctatattgattgctagggctccatcttctggggatgtcgcagcacatcctattgttaaggaaacatataattttgcacaagaaatggaacgaaaacgagcactgtccatggtcctctctcaaacaaggcaacaagaacgaagagatgaagaggttcttgttgaagcaaaaaaaatagcggaaaaacgcctacctcccaaggttgctgaacagtctcagttggttgcttctaatgctggtgcaaaagctacagagagggctgtccctggtgaaaccatatc

SEQ ID NO: 29627 - DNA, 223 bp, Glycine max
ttggggactttatatgagacggatcaactatgtgtcttaggggatatatttgatctccgattcattataatatctgataggtttccatcctctccgactgtatatgaattaaaggattcatattatagtgcttcccgatctatatttattgctatgcctccatcttctggtgatgtctcaccacatcctattgaaaaggaaacatataattttgcacaagaca

SEQ ID NO: 29628 - DNA, 413 bp, Glycine max
  modified_base (87)..(87): a, c, g, t, unknown, or other
ggacagagagaatgagtacggtgggagaagggaaggtgagtagtaatggtcatggatgttgcaaatcaaggccaggctatgcttccncactggaagccatttctggtcccagagagtctctcatttatgtaacctctgtctacacagggaccggattaaagaagccagactatttggcgacagtggatgtggatccaaactttccaacttattccaaagtaatccataggcttcctgttccttatttaggtgacgaattgcttcaaacaggctggaattcatgcagttcttgccatgagaacccttaaacaaaccgacatatttctaatcgaacctgcactcgtataggtcgagtatatgtggttgatgtgaaaacaaatccaagggctccatctttgcacaaagttgtcgag

SEQ ID NO: 29629 - DNA, 454 bp, Glycine max
cgacccactcctgcttacggatgacaacagacgacagattgagttatctgataacaacacatcttcgggagagagatcattacaatggggtacttggctctccattccgtttacaccttcgtttcgtcgtcatcgccatcgacttctatcacaacgcgtaacctttatccctccatatctgaccaaaacgacgtcgtgctacatcggcagcggacccgtcgatatacatcatggccattaaagcggctcacctgggtctgaacaccacttacttcctataacctgacactctataagcgacctgtctcaacgactgatgcattcattacaaggcactttagcatacataccacatgtaatacgaggctaaacatgcattttccaaccatgacctcaagttttcatttgtcaaaattattttcatacattacttcccaaaagataattcatttct

SEQ ID NO: 29630 - DNA, 384 bp, Glycine max
  modified_base (330)..(330): a, c, g, t, unknown, or other
tacacaaagttgtccaatgttttgtcaaagcaagctcttttctacaccgtgattcttccattcattgctttctttggggctttcgggtttgtgttgtaccctctcagcaattatattcaccctgaggcatttgcggacaagcttctcaacatcctcggacctaggttccttgggccccttgcgataatgagaatttggagcttctgtttgttttatgtcatggctgagttgtgggggagtgtggttatttccgtactcttttgggggtttgctaatcagataactactattgaagaagcaaaacgattctacccactgttcggactcggngccaatgtagcccttattttctctggccggacagtcaaatacttttctaatctg

SEQ ID NO: 29631 - DNA, 273 bp, Glycine max
atactgaatattgtgacattctcagagttggtttagaacagaaaagggaattgttcgcaaatggatctcaagattcgaagtctggccatacctagagacttacactgaggatgtcgcccttgaacttgccaaggagttgcaagccaagccagatctgattgttggaaactacagtgatggaaacattgctgcctctttgttagcacatagattaggagtaactcagcgtaccattgctcatgctctagaagagaccaagtaccctgagtctga

SEQ ID NO: 29632 - DNA, 411 bp, Glycine max
ggtgtgagttcattaacatatacaaattctctgtgttgtgttgtgtacttgtgttaattgtgttgttgttgtaggaaatttaagtgaagagagaatgatgatgaagtctgctatgtgtgcattggtgcttgtggcactggttgtggttgaagtggggcccatggctgaagctgcggtgacttgcaacccaacacagttgactccttgtcttccggcaattaattcaggttctgcaccttcgagtgcttgttgccagaagctgaaggagcaaaagccatgcttctgtggctacctcaaaaaccctagcttgaagcagtatgttaactctcctaatgccaaaaaaaccgttagttcttgtggtattgcctatccaacttgttaagcacctcttatatatatatataaaatgtg

SEQ ID NO: 29633 - DNA, 381 bp, Glycine max
  modified_base (300)..(300): a, c, g, t, unknown, or other
  modified_base (354)..(354): a, c, g, t, unknown, or other
ggtgttaggtggtgagaagaacgaatcgaagaaagaaagatcatggcgatggcaaacttggctcgacggaagggttacgccgtcgttttgtcgtcgaggtcgtcgctttgtctgacaaggtggagggggttcgcgtccggatctgacgaaaacgacgtcgtggtcatcggcggcggtcccggcggctacgtggcggccattaaagcggcgcagctgggtctgaaaaccacttgcatcgaaaaacgtggcactctcggcggtacctgcctcaacgtcggatgcatcccttccaaggcactnttgcattcttcccacatgtatcatgaggctaaacatgcatttgccaaccatggngtcaagttttcatctgtcgaggttgat

SEQ ID NO: 29634 - DNA, 423 bp, Glycine max
  modified_base (387)..(387): a, c, g, t, unknown, or other
gattacacacatcttcctgatcatgggattttccgagacggtagcaaggatatatctgaagcccaaaattctttgtataagagaacattgttgcaagatcttaatagacaaggtgcagttgttcttgaaggaaaaactttagatatggagatggaacacccaagaacagtagcagaaattcttgctcggagaaaacaggaatgtgatggggttgtagatgaggagagacaaaacagaatttctaagatgaccctgattgatgatcttcaggcacaagataatcatccgtatgcaccactctgtatcaaggatcctcgtgactattttgatttccaacaagctaatgctgtaaaaactttggatgattctcaaactggaatggagcanatgaaatgcagtttgggttctgaggaagcctatggt

SEQ ID NO: 29635 - DNA, 392 bp, Glycine max
gggagcgaagtgaattgaaattgaagtgactcggggggagttgactcagcaatggcggaagaggtgactcgggtgatggtggcggtgaacgagtcgagcattaagggataccctcatccttcgatcagcagcaaaggggctttcgactggaccatcaacaagatcgttcgcgacaacgtctctgccttcaaccttctttttcttcacgttcaagtccccgatgaagatggttttgatgacatggatagtatctttgcttctcctgacgattttaagaacatgaatcagagagatagaattagaggagttcatctgctggaatacttcatcaataggtgtcatgaaattggggtggtttgtcaagcatggataatgcatggtgatcccaaaaa

SEQ ID NO: 29636 - DNA, 172 bp, Glycine max
ggagcagaggacaagatgggtagtgtgagttatagcaatctgaagaacgccatgatagcattcttggtccctctaccctacatcctattctacctctcattccaatcggtcattagtactccttcttcttggtctactctggggacatggggctatcaccaccctatgctat

SEQ ID NO: 29637 - DNA, 410 bp, Glycine max
ggtgtgaaattgagttggttgcatttcactttcaattgctccaaatttctattgtaccaagcaaatttaacatagtttttttttttccaaatttttagcctccctagtttctatcttttcatttgctttgcgactaaatcaagcacatccttaattttctcattcccttttgtcaaatatagatggcatgctgttgcttcatggacttgggatgcccaggatgaaacctgtgggatttgtaagatggcctttgatggatgttgtcctgacttgtaacttcctggagatgacttgccattgagtaagctactcttgatgatattattggcgactttcatcggtattatggtttgcaccaaattgtcttgagttatttttcttaactaatcctttatattttgagaattcta

SEQ ID NO: 29638 - DNA, 337 bp, Glycine max
ggtgtgagttcattaacatatacaaattctctgtgttgtgttgtgtacttgtgttaattgtgttgttgttgtaggaaatttaagtgaagagagaatgatgatgaagtctgctatgtgtgcattggtgcttgtggcactggttgtggttgaagtggggcccatggctgaggctgcggtgacttgcaacccaacacagtcgactccttgtcttccggcaattaattcaggttctgcaccttcgagtgcttgttgccagaagctgaaggagcaaaagccatgcttctgtggctacctcaaaaaccctagcttgaagcagtatgttaactctcctaatgcc

SEQ ID NO: 29639 - DNA, 383 bp, Glycine max
gggtgaccaaatgcaaagacggcattgaaattgaacacaatccatgactaacacaagcgcagacgacaacataacactgctccaaacatatcaatttcaataatgttttcttctgcaatttctccgaagcccttccttcggtccctcgtcattgatcgttacgctcagagcacaactactgcaaccaggtgggagtgcttggggtttaacaagtcagaaaatttcagtaccaagagagagttgtgtgctgaggggttcaagctgaattgcttggttgaaaatagagagatggatgtggagtcatcatcatcatcatctttgggggatgaagcttccttgagcttaagtgaagaagatttaagggaacctaatatttcaacatt

SEQ ID NO: 29640 - DNA, 269 bp, Glycine max
ggcacacgtgagtttgttgatcgagataactagaaacagtgtgatgaaaatgaaagtccttgttgtcttcgctgctacaattttggtagcatgggaatgccatgcgtacgatatgttcactgtacgaatgaacactggctatggtgccctgactccggatgtgaaatgcgcaagttggacgcttgctgtggaagcacgcaacatctttggctatgagaccattcctgaatagtgcgttgaagcatacaaggaatacattcatggcgaac

SEQ ID NO: 29641 - DNA, 343 bp, Glycine max
gggactgtcactgaactcaaaaatgaactgtcttcggaatcttctcgattctctggtttgcccttcgaaacaccttgtacgcgccaccgcaagaaccttcccctttccctgggtttcgtcaacaattctcgtcaatatccaactattgccctcaaggcttgcttaagttctataccaagtgcagacacaagtagtgcccataaggaggaagaaaagtctgagacatatagtcataacatgaccgaagccatgggtgctggtttgacttataggcatgaattaggaatgaactataatttcattcgtccagacttgattgtgggatcatgcctacagactcctg

SEQ ID NO: 29642 - DNA, 259 bp, Glycine max
ggagagagagagagagagaggcacttggaatccaaaaatgagagaaatcatcagcattcacataagtcaagccgggatccaagttggcaacttctgctgggaactctactggctggaacatggcattcagcccgatggcatgatgcccagtgacttcttcttcggtgtagcccacgacgcctttaacaccttttttagcgaaaccggattcggcaagcacgttccttgcgccgtcttcgtcgatcttgagcccaccgtg

SEQ ID NO: 29643 - DNA, 172 bp, Glycine max; identical to SEQ ID NO: 29636

SEQ ID NO: 29644 - DNA, 389 bp, Glycine max
ggtgtcggcctctacctatatattccactcactacccagaaactagggtttagcgccacaccccaatcgtagccgtcgcactctgtgttttcagcgccgtctccgatctccgacaatggcgacccaaatgagcaagaagagaaagttcgtagctgatggagtgttcttcgctgaactgaacgaggttctgacaagagagttggccgaggacggttactccggcgtggaagttagggttacgccgatgcgcaccgaaatcataattagagccaccagaacccaagctgttctcggtgagaagggaaggagaataagggaacttacctctgtggttcagaagaggttcaagtttcccgagaacagtgtcgaactttatgctgaaaaggtca

SEQ ID NO: 29645 - DNA, 239 bp, Glycine max
gtctcaggatgaacataaccgggatgaacttgctgagaaatctcctgaaagaaagttgtccagtctcacttctccagcagaagtaccattgaactcttcatcctcaactgttcttgaaaaggtgcctgatacttcgatgccaagtgacaatacttccctcttcagccgtttctacctttccaaacttgacatttcggtggacttagtactgccagagttgtatgaccagtgtatgtgtg

SEQ ID NO: 29646 - DNA, 375 bp, Glycine max
  modified_base (234)..(234): a, c, g, t, unknown, or other
ggggacaaagatgtccagcgaagcaagtaaggttgaaatctctatgatcgaaaacagtgtccttgtggctctcctggtgtctcctactctattctcccctttcgttggcttttgaaggtgaaacttttcccctcttccgtgagaacagaacaacctcagaaaaccctaaacccctccaacccattcccacattgtactaccctgttagttagtcaagtagcttcactcactctntctatttccagaatgccaaatccaaatccaaagcaccttttccacgccactctcttcctctcgatacttctccaggcgctgtctaaatccacgattgagccatgctcgaactccgactcatgcaacgcgcttctgggatac

SEQ ID NO: 29647 - DNA, 267 bp, Glycine max
atatcagaatggagctgctcgaaccgtgtctatcgaagcagtaatgaaccagtctgaggaaactgtactataatcaggcactgagtgctgggcttgctgatgacagttgacttgccacgcactaattgtgcgaatcgagctctatggctgtagacactatgatgcaacatgtggagcatctctatactagatgcagggacactgctcaagtctacatcatgagcatctggacacagactgagactgctatgagccgtgatgcgggac

SEQ ID NO: 29648 - DNA, 419 bp, Glycine max
ggatgtaaaaaatagaggttgaagaagtaagcaccaacgtgaataccctaattcggagggtttcagttttcgccctcttttctcatctccaacatcttcgtcgtcacggaggctagtcttcctgttatcacaaacaatgtctgacggtcaagaatcagacaagaatattgagatatggaagatcaagaaattgataaaggcattggaagctgctcgaggtaatggtaccagcatgatttctctgataatgcctgcacgtgatcaaatatctcgggtcactaagatgttgggagatgaatttggaactgcttcaaacatgcaaagtacggtgaaccgacagtctgtggtgggagccattacttgtggttcacagaaggtggaactttattaccagggcccttcaaatggtttgggtcttt

SEQ ID NO: 29649 - DNA, 428 bp, Glycine max
ggcacagaatggggaaaacggcttacaagaggctgaagggaagccagagcttcaggcaacgccttcttctctctactctctcctccactcccattctcatcgaggacattcgcgccgacgagacatggcccggcctccgcaaccacgaaatttctctcctccgactcttcgaaaccgtctgcgacgattgccacgtcgaaatcagcgaaaccggtaccaaattaaagtacaaaccgggaactattatgggtggcagacaacacagtccacacgattgcggcgtctcacggtccattggttactttctggagccactcatggtgttgtgtttgtttgccaaacagccccttactatcaggctcaaaggaattacaaatgattctaaagatccatctgttgataccttcaagtcaacgactttacctata

SEQ ID NO: 29650 - DNA, 425 bp, Glycine max
ggcacaagtgagtttgttgatcgagataactagaaacagtgtgatgaaaatgaaggtccttgttttcttcgttgctacaattttggtagcatggcaatgccatgcgtacgatatgttccctctccgaatgaacactggctatggtgcccgtactccggaggtgaaatgcgcaagttggaggcttgctgtggaagcacacaacatctttggctttgagaccattcctgaagagtgcgttgaagcaacaaaggaatacatccatggcgaacaatatagatcagactccaaaacagttaaccaacaagcttacttttatgccagagacctcgaagtccatcccaaggacacatttgtgttcagtatagatggcaccgtactctctaatattccatactacaaaaaacatggatattgggtggagaaat

SEQ ID NO: 29651 - DNA, 56 bp, Glycine max
aggacgactgatgtgtatgaactaattcacattattggggttgatttggcctatta

SEQ ID NO: 29652 - DNA, 388 bp, Glycine max
ggaccaaattagaaatttacagcggcccacagatgttcctgatacaggtttgctttgtgatctgctttggtctgacccgaccaaagatgttcaaggatggggaatgaatgacagaggagtttaatacacatttggtgctgataaggtctaacaatttcttcagaaccatgatcttgatcttgtttgtcgtgctcatcaggttgtggaagatggatacaagttctttgctaatcgacaacttgtaacaatattttcagcacctaattattgtggggagtttgacaatgctggtgctatgatgagtgttgatgagacgctaatgtgctctttccaaatattaaagccagctgataaaaaagcaaagctcaattttggaagtacaaccact

SEQ ID NO: 29653 - DNA, 210 bp, Glycine max
gactgctgaaatgggactatatgaggctagaacggtgaaccactttagacttgtagagtgagcagtacataggactattcttggtgctactgatgctgttgacacgctagatgatgcctatgctactgaatgtgctatacgaaatgctggcacaggataagacctttgttgagtgctctactgcagaaatgcattggctaccatggacag

SEQ ID NO: 29654 - DNA, 293 bp, Glycine max
aggcgtgcgaacaggtgcgagaggacgtctgaatgggcgatagttaaatgatgttttaatttaaatttagcgtatgctattcattgatctttcattctaatgtgagattgaccacacacatgaactatataacgtcatctataacaagatacatgtactaatagttcattaatcaagatagggaaaacactggcgattctcaactcaatatactatttttgattaatgatttcatcagtattcgtaattacgaaacagactagtagattgagagatgcaaacagttgcacatt

SEQ ID NO: 29655 - DNA, 391 bp, Glycine max
ggcagcaatgagagctgaaacataagctttagaataaaaaaaacggagaaagaaattcaaaagggtatctgaaaaatgccttttcatccgtattccttttgagctcgtctacaatggccgatgatctctcttccttagccaaggatgttttgcttgtgaagggtttgaagagttccactttggtgtggaggcttgttgttttgacccttgcaatggtatgtggcgtgtatatatgttcaatttgtctgaagcagataggcactagcagcaagattggttttctagatatcaaggttgttcaaaagccatgtccagaacctaatattgaaccttgggagattccttatgtgcactaccctaaccccaaaacttacagcagggcggaatgtgc

SEQ ID NO: 29656 - DNA, 406 bp, Glycine max
ggcagcaaaccagactaaactccgacgatgcctcccgtcgctcctcgatccggtgatgccatattcgccaacgtcgaacgcgtcaatgcggagctgtttactttgacgtatggcgcaattgtgcgtcaattgctcacggatctggaagaggctgaggaggttaacaagcagcttgatcaaatgggttacaatattggaatccgtttgattgatgagtttttagccaagtctaatgtctccagatgcaacgatttcagagagacgactgatgttattgcaaaggttggttttaaaatgttcctcggtgttactgcatctgtgaccaattgggatgctgatggaacatgttgtagtattgttttggaggataatcctttggtagattttgttgagcttcctgacaact

SEQ ID NO: 29657 - DNA, 410 bp, Glycine max
  modified_base (391)..(391): a, c, g, t, unknown, or other
ggagagtgagtgagttaatatgttatcattgttatggtgaaagtgaaaccaaacaccgaagctgttgagtgattttcattgatccagatcgtgtctgttctacgtacgatgtacagcggctccagcgacggcgaaagccatgacgcccctcagagtcagaggaaaattccgccggcatcctccatgctttgggtccgcaatcttcgccgtttcatcggatccggcgccggcctcggatccgaggccttgatggagcttgaaactaagagaattttgctcgacatttttaaggaaaagcagaagaaaaccgccgaagctgctacaattcccactttctacaagaagaaacctgaagatggatcaatcagtcatagagttcagagattggcanagtatcgctttctaaggaa

SEQ ID NO: 29658 - DNA, 296 bp, Glycine max
cgacaaaacgacatattcatatatataatagcatctggtcgccacaggggaggtgactattgctacaacgacagcattaacatcatctcaggttaatttgcaactacacttactggtgtatttcaattaatttaaacggcgcacttacctccaaagatcccaaacatgttacccagttagccagatttctgtttacaccaacataagatgcaatttccacctcttaataacaacggcaccatcaccaacaactatcaatctcacagtcagaacccttactgggtgaatgaatttat

SEQ ID NO: 29659 - DNA, 425 bp, Glycine max
ggggtagagaggatccgtggcaccagagattggaagaatgccatgattgggggtgcagtaactggggccctggtatctgcagccagcaacaacaagaaagacaaaattgcaatagatgccattactggggcagcaattgctactgctgcagagttcataaattaccttacctgaatgaatgaaagtggatgtcttgctggttttcttgcatgttttggaaaaggattgcacactcagtctctctttagtcatactctgtaccggttccgtctttgatattggtgcagttacttctaagatatgctatttatttaactttctataaaacccatgttttgataaattatattggccattcggttttctgcatgttagtagctttgccttgcaatttagtcaagctagacttgtgcaattatgtcaaa

SEQ ID NO: 29660 - DNA, 380 bp, Glycine max
gggggtaggaggtgtcagaaacctggctgccacaaaggagctgagggccgtacagtgtactgcaaggcacatggaggtggcaggcgatgtgaattccttggttgcacaaagagtgcagaaggacgtacagatttctgtattgcccatggtggtggccggagatgcaatcatgaaggttgtacccgggctgccagagggaaatctggattgtgcatccggcatggtgggggcaagagatgccagagagaaaattgcaccaagagtgcagaaggcctatcaggcctttgtatctcacatggtggagggcgtcgacgccaagctcctggatgtacaaaaggggcacaggggagcacaatgttttgcaaagcacatggtggggg

SEQ ID NO: 29661 - DNA, 346 bp, Glycine max
  modified_base (269)..(269): a, c, g, t, unknown, or other
cactatgatgtcaacaacgaaatgctgcacggttcattttaccaagataggctaggcaaggatataagggcaaacatgttcaagactgcaagccaactagacccttctgccacactctttgtgaatgattatcatgttgaagatggatgcgacaccagatcatgtccagataagtacatccatcacattcttgatttgcaagagcaaggtgctccggttgggggaattggaattcaaagccacatagactgtccaatagggcctattgntagttcttccctggacaagttgggtattcttggcctacctatatggttcaccgagcttgacgtgtctttcgtcaacg

SEQ ID NO: 29662 - DNA, 340 bp, Glycine max
  modified_base (267)..(267): a, c, g, t, unknown, or other
gatgatggtgaagaccagaatgattttgtggacattttgctttcgattcaagagactaacaccacagatttccagattgatagaacattcgtcaagactttggtcatggtaagaagatctatcttagtaatgtattctttaaaacctattttttaacatttcttattgatttaaattaatgtggatttcactaattagaggtgaaattcattcaagaagtgtaacccacttagttagtgaaatccaggtgaatttcatctaatacanaaagtatgtaaagactaaagagcattgaaaattaaagaatgtgttgataacatttttctttctaatatatctc

SEQ ID NO: 29663 - DNA, 383 bp, Glycine max
ggagacacgtggcattgtgtttctcttcatggcgttctctgctactctatcctacacctccttcccttgccttcctcgtttcccgcaaactttgagaacaaaaagtgttcatttccctctgattcgtgcagtgcaaggtggtcaagcagagacacccgagagcaagaagagtgaagggtcatctaatgctcagtcttcaagtgctgctgctcctaaacccaagaaacccgtctattccttgaagaaaggtcagattgtgagggtggacaaggagaaatatctcaatagcgtcaattatctttctgttgggcacccaccttattacaaaggattagattacatttatgaggaccgtggtgaggtcctggatatgcgtatatttg

SEQ ID NO: 29664 - DNA, 400 bp, Glycine max
ggcattatatttgagttcaaacaaatcaaagccatggccacctccaacttctctattgttctctccgtctccctagccttctttttggtgctacttaccaaggcacactcgaccgataccgtttctttcaccttcaacaagttcaacccagtccaaccaaacattatgctccaaaaagatgctagtatttcatcctctggggtgttacaactcaccaaagttggcagcaacggcgtgcccacctcgggatctctcggtcgtgccctttacgctgccccaatccagatttgggacagcgaaaccggcaaggtagccagctgggctacatcctttaaattcaacattttcgcacccaacaaatcaaactcagctgacgggcttgccttcttcttggcacccg

SEQ ID NO: 29665 - DNA, 411 bp, Glycine max
agaaggggaaaccaagaggggagaatctctctctggttgtttgggtttgaagtctcccttccttccttcctctctctctccttttctttcctctatgaacttcctcaccagaaaaacaaaaccaccacaaggtttcttttcttcctgggcttgaactccacaaagccaaggaaggaaaacaaaccaaaccaaacatattccttatttcccacttgttcaacctgtggtttatttatccttggaatatggttcaaagaaaagtgcctagcaagcttggtatccaagctgaacatgttaaatcagacaagaggttgtcaaacctgaagctactatcttcatctcatcaccaagatggaaaaaatagaggggctgatatgaagaagaaaatgaaaaaatcaaggtcaataaagc

SEQ ID NO: 29666 - DNA, 391 bp, Glycine max
aactctgcgaaggtgcaacctgacagcctccaaatccaatggcttcagagaagaaactttcgaacccaatgagggagataaaagtgcagaagctcgtcctcaatatctctgttggcgagagtggagatcgtctcaccagagccgccaaggtgttggaacaacttagtggccaaaccccagtgttttccaaagcacggtacactgttcgttcctttgggattagaagaaatgagaagattgcatgctatgtcactgtcagaggtgacaaggcaatgcaacttttggagagtggtttgaaggtgaaagaatatgaacttcttagaaggaacttcagtgatactggttgcttcggctttggtattcaagagcatatcgatttgggaatcaagta

SEQ ID NO: 29667 - DNA, 81 bp, Glycine max
gcacgtactcgtccgattcccggtcgaccacgcgtcgcccacgcgtcgccacgctcgtgaccttgcggacgcgtgcggagc

SEQ ID NO: 29668 - DNA, 395 bp, Glycine max
gacgataaagggtttttgttttgtttccttgggtgctgcatgcactttcactcgaagaaccttgaagcgagtctgggccacagcaaccagcgacaacaactcaatcagctagggttgctttgcttgccatcttgttggaggattttctgttcaagagaagatggtaactagaattgtggatcttcgttcagacacagttacaaagccaactgaagcaatgagagctgctatggcaagtgctgaagttgatgacgatgttctaagctatgatccaactgcttttcgcttaaaaacagaaatggcaaagacaatgggcaaagaagctgctctttttggtccatctggcactatggggaaccttggatctgtacttggtcattgtgatgtcaggggaa

SEQ ID NO: 29669 - DNA, 421 bp, Glycine max
ggggtagagaggatccgtggcaccagagattgggggaatgccatgattgggggtgcagtaactggggccctggtatctgcagccagcaacaacaagaaagacaaaattgcaatagatgccattactggggcagcaattgctactgctgcagagttcataaattaccttacctgaatgaatgaaagtggatgtattgctggttttcttgcatgttttggaaaaggattgcacactcagtctctctttagtcatactctgtaccggttccgtctttgatattggtgcagttacttctaagatatgctatttatttaactttctataaaacccatgttttgataaattatattggccattcggttttctgcatgttagtagctttgccttgcaatttagtcaagctagacttgtgcaattatgt

SEQ ID NO: 29670 - DNA, 425 bp, Glycine max
tccaagtcaagactctaaattaactaacctgaggcatacagtgcctagtcccatttctcctgccaaaaggaagagaagtactgacagtaagcaaaacaaaaaagccaaagtcaaagcaaaatctgaaccaagtggttcaaagcaggccacaattacaagattcttcagtaaagtaatacctgagatgcctggtggtactcaatctgataattctgaaccaaagcttgaccaaagctctaaagttgaagacttgttgccaactgatgatggacaaatgtacaaggatgaaattgatcaatttatgcaaataataaatgggactgagtcattaaaaaaatatgccatcactataattgggaagacaaaaggtgatatcaataaggcattggacatatattacggtaattctgaaaatcttggtgaaa

SEQ ID NO: 29671 - DNA, 411 bp, Glycine max
ggaatgggtgaggctgaaaaactgagtaataagctccttgagcatagttctgatgctggtagtgacttttcagacaaagttttgaagtcaagaatgcctgcaaagtttcatcaaccatcctcttctgaacctgtgaaagagcagtgtccagtaatatgcccgattgagctacggcaggaattgaggccaaaaagggcagatccatctggccatacttcagatgacaataatatagttactgttcccactgcaaaaggagggatgaggaggaagcatcatcgtgcatggactcttgttgaggtgattaaattggtggaaggtgtgtcacggtgtggagcaaggaagtggtctgaaatcaaacggctctcctttgcatcatactcatatcgtacctctgttgatcttaaggac

SEQ ID NO: 29672 - DNA, 388 bp, Glycine max
ggctgtgaagtgtgaattaaaatatattcaattttgcgtttctctgcctaaaaggattgaaagatgggtcaagcattcggttgctaccaagtcgatcagtcaaatgtggctatcaaggagcattttggaaaatttgatgatgtcctagagcctggatgtcactgcctgccttggtgtcttgggtaccagattgctggtagtctgtcgctgcgagtgcagcaacttgatgttcgatgtgagacgaaaaccagggacaatgtctttgtcaatgtggttgcatctgtgcaataccgagctgtgtctgagaaagcatctgatgcattctataggcttaccaacacaagggagcagatccaatcatatgtttttgatgtcatcagggccagtg

SEQ ID NO: 29673 - DNA, 227 bp, Glycine max
  modified_base (48)..(48): a, c, g, t, unknown, or other
gaagagtttgttgtgagctataagctagtttatcgtgaggagaatatngaagttgttgttttctttgttgctgcagtagttttggtagcatggccatgccatggcgcaagctaccaaaagtttcctcttcgaatgaaaactggctattgtgagcgttcttcggaggtaaaatgcgcaagttttaagcttgctgtggaagcgcacaacattcgagcctttaaaaccat

SEQ ID NO: 29674 - DNA, 409 bp, Glycine max
gatactcaaattgcttaaggtcttcaacttcacccattcatacgtggtgttgttactgctgctcttttctcttttcttttctctttagttctctcttcccctttctttttctttttcttcttcttctgagcttgtttaagcttttcttccattaacatattatcacaatgtgtggtattcttgctgttcttggttgttctgatgactctcgagccaaaagggtccgcgtgcttgagctctctcgcagattgaagcaccgtggccctgactggagtgggctccatcaacatggtgactgctttttggcacatcaacggttagccatagttgatcctgcttctggggatcaacctctctttaacgaggacaaatccgtcattgttacggtaaatggagagatttacaacca

SEQ ID NO: 29675 - DNA, 405 bp, Glycine max
ggatgccttatacagagaaagagaatgtggaccagggcgctcgaggtgacgctagcggtacacgaggaagtggagcggttggagcggctgatagtgaaggagctccagaatgaccctgcctccaacaaacagcgcttgtatcagagtcaccgtgtgctaaacatgatcgacaccattacttccaccactgaaaagcttattggggtatatgaagataacgacaatgcaaggaaggaccagattgctgcactcggaggccaaaccgccactggaattaacgtttttagcgccttttatgatagacttaaagagatacgagagtatcataggaagcacccagttgctcgagctgctgacgccaatgacgatcatgaaacacttctcaatgaggaacctcaaattgag

SEQ ID NO: 29676 - DNA, 411 bp, Glycine max
gctagacaattggctcagaagaaaagaaaagcaaccaagaatggttctcacatccactgccacacacccagatgaacaagaccagagcctaaactatacttttgcttccagatatgtgcgtgaacctattccaaagttcaagatgccggagaaatccataccaaaagatgctgcttatcagataataaacgatgagttgatgttggatggtgcaccaaggctcaacttggcctcgtttgtgaccacttggatggagcctgaatgtgacaagctcataatggcttcacttaacaagaactaccttgacatggatgagaatactgtgaccactgagctccagaaacggggtgtgaatatcatagcgcatatatatcatgcgcctataagagatgatgagactgcactatgtgt

SEQ ID NO: 29677 - DNA, 397 bp, Glycine max
  modified_base (370)..(370): a, c, g, t, unknown, or other
gaaggcaatcaatcaatcttctgagagtgtttggttgaaagtagcaaagatgtttcctttcgggcaaaagggtcaaaagataaaggggactatggtggttatgcagaagaatgtgttggatatcaacagcatcaccagtgttggagggatcgttgaccaaggcttaggcttcataggcagtgcagtcgatgcacttacttttgcagccaccaaaatctccatccagttgattagtgctaccaaagctgatggtgggaaaggaaaaattggaaagagtacaaatttaagaggaaagataacattaccaaccttgggagctggcgaacaagcatacgatgttaattttgaatgggacagtgacttcggaatntcccgtgcattttatattaagaacttc

SEQ ID NO: 29678 - DNA, 431 bp, Glycine max
  modified_base (416)..(416): a, c, g, t, unknown, or other
ggagagaaagtgagagagaattacagagcattttccaacacgattacacgaccgaatcaaacccctctttctctccgaagctgcttttaatatcgtactggccttcgattgttctcctctttaatacatactgttctctcttcgatttgagggaacagtacaagagtctgagcatcggttaacccaactgcacaggtagtctccaaataatggagcctcatgatgagactggatgccaggctcctgaacgccccattctttgcattaataattgtggcttctttggaagagcagctaccatgaacatgtgttccaagtgttacaaggacatgctgttgaagcaggagcaggacaaatttgcagcatcatccgttgaaaacattgtgaatggcagttccaatggcaatggaaagcangctgtggctactggt

SEQ ID NO: 29679 - DNA, 303 bp, Glycine max
ggcgaggaagccacatagagacacaatacagagtgagttgttgctccttcgccacaactctctgccaacatgggtatctccagagattctatgcacaagaggcgtgccactggtggcaagaagaaggcctggaggaaaaagagaaagtatgagcttggtcgccagcctgctaacactaagctgtcaagcaacaagacagtcaggaggatccgtgttagaggtggaaatgtgaaatggagggcattgagattggatactggaaattactcctggggaagtgaaactgtaactcgcaagaatcgt

SEQ ID NO: 29680 - DNA, 417 bp, Glycine max
gatgcaaacagtactgaatcatcacctctggttgagaactctcgtgcctcagttgaccttgttacagttcttgatgtgagtggtagcatggctggtactaagctagcgttgctaaaacgagctatgggttttgtcattcagaatcttggtccatcagaccggctgtctgtcattgccttctcctccactgcacgccgcatctttcctctccggcagatgactgacactggacggcagcaggcattacaggctgtcaattccttggtttcaaatggtgggacaaacattgctgaaggcctgaggaaaggtgccaaggtttttttccgaccgacggtggaagaactcggttagcagcatcattttactctctgatgggcaagatacatatacagtcaatagcaagcctaatgttggaac

SEQ ID NO: 29681 - DNA, 249 bp, Glycine max
  modified_base (149)..(149): a, c, g, t, unknown, or other
  modified_base (199)..(199): a, c, g, t, unknown, or other
  modified_base (241)..(241): a, c, g, t, unknown, or other
ggagtgagcaagagtgaagagcgaagagaatggctcccaagggtttaatctttttggctgtgttatgcttctcagcactgtcactgagtcgttgtcttgcggaggataatggacttgttatgaacttctacaaggaatcatgccctcangctgaagacatcatcaaagaacaagtcaagcttctctacaagcgccacangaacactgctttctcctggctcagaaacatcttccatgactngtgctgtc

SEQ ID NO: 29682 - DNA, 414 bp, Glycine max
gtttccacaggtgccatatccgtggagggtgttccttcaaaggaatacttcattgatgtgaaagctgttcagattgatggaaatgttgtgaacttaaagccttcccttttagctattgacaacaagggaaatgggggaaccaaactcagcaccatgagtcctttcactgaattacaaacaactgtctacaagactttcattcgagatttcatcaagaaggcttcggacagaagattaaagagggtggcatcagtggcaccatttgaggcatgttatgattcaaccagcattagaaattcctcaactggactagttgtgccaactattgatctagtgctgcgaggtggagtgcagtggactatttatggagccaattcaatggttatggcaaagaaaaatgtagcatgtcttgca

SEQ ID NO: 29683 - DNA, 411 bp, Glycine max
gcagccagttacgtgagggggcttcagggaactgacggtaaccggttaaaggtcgctgcctcttgcaaacactttacggcttatgaccttgataattggaacggtgtggatcgctttcactttaatgcacaggttagcaagcaggacattgaggacacgttcaatgtgccattcagaatgtgcgtgaaggaaggcaaagtggcgagtgtgatgtgttcttacaatcaggttaacggggttcccacctgtgcggaccccatcctcctaaagagaacagttcgtggccaatggggtcttaatgggtacattgtatcagactgtgactctgttggggtgttttacaatagccaacattacacatctaccccagaagaagctgctgccgatgccattaaagctggctagttacta

SEQ ID NO: 29684 - DNA, 409 bp, Glycine max
ggcattcaactgaaaaaggaagaggaaaacctctcattttctctctctctctctctaaacacagatttcatttccaattctctatctctagaaaatgggaacaacaattcttcgttcccacgattgcctccaaggccggttcctccacaacgaagccttcgccattgccgcatcacgtgtcgcatcgcgaagaaactctaatcctaacaataatagcttcgcctcctccgccaaaccaaaccgctgccggaagcggagtccggtcaccaatcgagaccgccgtcgatctccggcgaaggccaccttgccggcgaatctcgtcatgggacacgttaagatcctgaagcgaggcgagaaattgagcctccagaataataccaaccaaagactcgcggagaacgtttcgatg

SEQ ID NO: 29685 - DNA, 406 bp, Glycine max
gaagcagtgaagttgtacaaggagcacaaaaggagaatgagcacaaggaacctagaatgcatctgtgaggcttctatagaatggactgctatgaaccttgcattttgttcattgtgtggcattgtagggggaattgttggaggcctacttggttctggaggtggatttgttttgggacctcttcttctagagattggtgtcattcctcaggttgctagtgctacagcaacatttgtgatgatgttttcatcatctctgtcagtggttgaattctaccttctcaagaggttccccattccttatgcattatacctcacctcagtgtctgttttggctggcttctggggacaattctttgtaagaagattgattgcatgccttgggagggcatcaatcattgtattca

SEQ ID NO: 29686 - DNA, 221 bp, Glycine max
gagatatggctgatgaatcatcaatcgcggtggcagtgaacaatcttgtttcactgaaaggtccaaaagatgtttctgatagcctaaggaaacttgatcgacttaaagacaaggagaatcaaagcttccgactagctcctggactagacttgaaactttcagcaaaaagaaaaggaagcaatatatgcaaatagggggtgtgttactttcttcatgccaat

SEQ ID NO: 29687 - DNA, 405 bp, Glycine max
gtacttaaggaggatgagtctccttgtatttttggttcaattgaaaagcagagatggtcctatgcctgtgctaagcagttgattgagaggcttgtttatgctgagggtgctgaaaatggcttggaattcacaattgtgaggccttttaattggattggaccacgaatggatttcattcccggcattgatggcccaagtgagggtgttcctcgggttctggcatgctttagcaataatctcctccgtggagagcccctcaagcttgtggatggtggccaatcccagaggacttttgtgtatattaaggatgctattgaagctgtcttattgatgattgaaaatcccgccagggctaatggacatatttttaatgtgggaaacccaaacaatgaggttacagttagg

SEQ ID NO: 29688 - DNA, 406 bp, Glycine max
gggagcaagagtaataataatgtgtataatgctggagcagcgggtatggtaaaaaaaatcatacgaaaagaaaaagggggatacgaaataactatagtggatgcattggatgggcgtgaagcgattgatattatacctccaggaccagaacttcttgattcagaaggtgaatctatcaaacttgatcagccattaacaagtaatccaaatgtgggtggatttggtcagggggatgcggaaatagtacttcaagatccgttacgtgtccaaagtctcttgatcttcttcgcatctattattttagcacaaatctttttagttcttaagaagaaacaatttgagaaggttcaattgtccgaaatgaatttctagtcccgcatatttatcaacatattaaactcataaa

SEQ ID NO: 29689 - DNA, 420 bp, Glycine max
ggttgaaacagggattattattattgtagagcggagaactgatgacaatgtctgctgaatcgtcaagttctgctcgtaaagtggttgctcatctcatagccaccggcgatgctcctattctcaagcaattcaaattcaaggtatcctctttcgaccttactctttaatgcccatcttttatttcttcatatttctcatcaaaattgttaattgaacgatccccctttacttgcgttcctttgtttaaaattcttctggtgtcagttatactttatttgttgctaatacaaagttgtgggtgagagagatggtgcttaaatctgaatggatgaaggagatgttatttcgcctgcattatgtatggcagtcaattatgtgggtattctaatttcataattggtgatattaaccctaattgat

SEQ ID NO: 29690 - DNA, 417 bp, Glycine max
ggagtgagacaatatcacacataatataattccaaaatcactcctattgctatagcaatatgatgggtgacactgagatcaaaccatcagttgaagtagtcatatgtgcttccatgaacaataacaatagcgcaaacaaccacacccttccaaccgacatcaccaagtcatcacaatcacacttaccaatcttgaccaagctccatgctggttactttttcatatgcctttcctttggtgcacaagctttgctctggaagagtttgagtaaacacaacaaggactcacaaactctctggcatggattcaatttgatgccttccattgcgtttctactactttggtgtgtggcactgctcactgccactactttgtctttactttacgtgctcaagtgcatctttcacttggacatgg

SEQ ID NO: 29691 - DNA, 246 bp, Glycine max
ccgcgtatagtgggcagcgtagctctgaattgggaacgactgttagacaagatagtcacatgaacaaagccaagctaatcaacatgcttgatgaggtggaccaaaggtacatgcagcaccacagccagattcaaattgtgatattctctatcgagcaatctgctgggataggctcaactaggacgtacactgatctagcactgcatacagtttcaaatcaattacagcgcctgaaggatgcaataa

SEQ ID NO: 29692 - DNA, 365 bp, Glycine max
gactgcaggctgcttggtaatctcctcagtgacattctccagcgtgaaattggcaccaacttgcttgacaagatcgaaaggactcgagtccttgctcaaagtggttgtaatatgaagcaagcgggtattgtaaacatggcacagatgcttgagaagcagttggcttccgagttatcaaagatgaccctagaagaaactttcacccttgctcgtgccttcagccattatcttactttgatgggtatagctgaaaccccacataaggctccgtaaggatggaatatggcacaaattgcaaaatcttgcgatgatatatttaaaccacttgtgcaaggtggagttcccccagaagaactttatgacac

SEQ ID NO: 29693 - DNA, 398 bp, Glycine max
  modified_base (333)..(333): a, c, g, t, unknown, or other
gggggcggtctgtatatgcaaatattcagaaatttatccagtttcagcttacagtaaatgtggccgctctagtgataaatgttgttgctgctatttcatctggtgatgttccattaaatgcagtgcagcttctttgggtaaatcttatcatggatactctgggagcactagccctggcaactgaaccaccaactgatcacctcatggatcgatccccagtgggtcgaagagaacctctcataacaaatattatgtggaggaatttgctgatacaggcaatgtaccaagtgtctgtcttgcttgtgctcaatttccgaggcataagcatactgngtctgagccatgacagaaaagctcatgcaatcaaagtgaagaatactttgatattcaatgcattt

SEQ ID NO: 29694 - DNA, 412 bp, Glycine max
gacctaaaattccgaagttctttttcttataatggggctcttgtggaaaactcacacgaggatacacgtgattagaacattttttgcaatccttttggttgcactgctgagttcagagagagtagagagcagaaaagccaaagttgtgaccacttccttggagtacaatgctataaactgcagagctcacagtgctgcattgacagattttggtggtgttggggatggaaaaacatccaacacaaaggcatttcagtctgcaataagtcacctgagtcagtatgcttctgaaggtggctctcagctctatgttcctgcaggaaaatggctcactggtagcttcagcctcactagtcacttcaccctctatcttgacaaagatgctgttctccttgcttctcaggatataact

SEQ ID NO: 29695 - DNA, 393 bp, Glycine max
gatgcacaattgagttatataatcgtctataatcatatctgtgtatcaattttctttcaccatcctagctagctttgctgtaaacatctgatctgagttcatatatatggcgaataaactgaatataagggtaggagaagcaactctggtgccaccagcagaagaaacaaaaaagggtatatacttcctttcaaaccttgaccagaacatagcacatccagttcgaaccgtttacttttataataagtctccatgtagagggaacgaggaagcagcacaagtcataaaggatgctttgtcaaaagttcttgttcactattaccctatggctggaagattgaccatcagttcagaagggaagctgatcatagagtgcacaggtgagggtgttgt

SEQ ID NO: 29696 - DNA, 404 bp, Glycine max
ggagcagagtatcggcatagcgtagccatggccatgggattgacctcacaactcctcctttctttgttcatcagtacccttcttcttcttcttccctcttccctttcacaatctaaccagttttgtgacgctggaacttcatccaagctgttgatcaagggcggcaccgttgtgaatgctcaccaccaacaggttgccgatgtctatgtcgaagatggtatcattgttgccatcaatcccactattacggttggagatgaggtgacggtcatagatgccactggcaagtttgtcatgccagggggcattgaccctcacacccacctagagtttgagtttatggatacggaaactgtagatgacttcttcagtggtcaggctgcagcattagctggtgggacaac

SEQ ID NO: 29697 - DNA, 155 bp, Glycine max
gggagccagagtaataataatgggtataatgctgcagcaacgggtattggaaaaaaaattattccaaaaggaaaagggggattccaaattactattgtggatgccttggatgggccttaaatgaatgatattatacctctccgaccagaactttt

SEQ ID NO: 29698 - DNA, 400 bp, Glycine max
ggttctagtgtgtgattgtttgttgttgtaactcgttcttcttcttttgttgttctgtgtttgtgtttgttttttctctcacctgaaaatgtcttgctgcggtggtaactgtggttgcggaagctcctgcaagtgcggcaacggctgcggaggctgcaagatgtacccagacttgagctacactgagtcaaccaccaccgagaccttggtcatgggagtggcacctgttaaggctcaatttgagggtgctgaaatgggtgtgcccgctgagaacgatggctgcaaatgtggaccaaactgctcctgcaacccctgcacttgcaagtgaagtgttgggagagcaagcttcaagcagagatagcccttaattaggaataatgataaactattaatgtgtagc

SEQ ID NO: 29699 - DNA, 428 bp, Glycine max
ttccaaaagaccacccaatggggtgtttaagtgagtttgttgatcgagggaacttgaaacattgtgattagaatgaaggtccttgccttcttcgttgctacaattctgagagcatgtcaatgccatgcttactatatgttccctctctgaatgaacactggctatggcgcccgttcttcgaaggtgaactgctcattttggaggcttgctgcataaacacacaacatctttggctttgagaccattcctgaagaatgcgtagaagcaacatatgaatacattcattgccaacagtatatatcatacttcagaacagttaaccaacactctcacttttatgcctgagacctagaactccattccaaggacacatttgtgttcaatatatatgtcaccgtactctttaatattccatactacctcataaa

SEQ ID NO: 29700 - DNA, 300 bp, Glycine max
  modified_base (245)..(245): a, c, g, t, unknown, or other
ggaagtgggaagcgtagctctgaattgtcaactacggagagacaagaaattcagatgaagaaagccaagctaatcaacatgcttgatgaggtggagcaaaggtacaggcagtaccacagccagatgcagattgtgatatcctctttcgagcaagctgctgggataggctcagcgaggacgtacactgctctagcattgcatacaatttcaaagcaatttcggtgtctgaaggatgcaataacggngcaaatcagagctgcatacaagagtttgggggaagaggattgctttggtgctaaa

SEQ ID NO: 29701 - DNA, 396 bp, Glycine max
ggttctactgtgagatatgatagatcatgtaactcgttcttcttcttttgttgatctgtgtttgagctctgcaatgctctcacctgacaatgtatagatgctgtggtaactgcggttgcgtaatctactgcaagtgctgtaaccgctgcccacgctacttgatgtacccacacttgagctacactgagtcaaccaccaccgagaccttgtacatggaagactcacctggcaatgctcaatttgatggcactgaaatgggtacacccgctaagaactatggctgttgatgaggaccaaactgctactgctacaccttcactcgcaagtgatgaccctgcagagcaagcttcaagcacagatagcccttacttaggaataatgattaactattaatgt

SEQ ID NO: 29702 - DNA, 343 bp, Glycine max
tgggcccttgagattgggaagcattggtggctagcgaagctaagctaaaactaaactctttcagtttgttttagcttcagcttcttctgcttcttttgctttttccaccacaaccacaaccatgtcttctgccactgcctccaacactttcttccttcactcttgtttcctcctcttctgtctcctctcggatcctttctgtgtttccatgttctctggcattgacacaagagatttagaaaaccgagatgatttgtttccacagattctaagagacgacgcaatcgcaaggctttatgagcttgcgaaagtgaacgattctagctggtatttggagaagaca

SEQ ID NO: 29703 - DNA, 403 bp, Glycine max
gatagcattcgcaacggtgaggagaattggactatttcgtcgggaactatacaaggaagaaatagtatagaagattttcttgaagaggtgaaagagcgtttgaaatgtgaactgcaaggtaaaattgtcaaaaaaggttctgtggttcgagggagtggaattgagacaccttacaatgaaaagccatctgatcctaaactaatagcccgtcacatagtaaagcaagtcagagaaagtgtgactagagatactgacacaactttactccactcagaatcaacaggatcatacaaaagtgaaatgcagttcaatggaccaaagctcccagaatttttcagcagagataccaagaagttcttgtccaagaggcaaagaaatgttgtgagaagggaagcacatgctg

SEQ ID NO: 29704 - DNA, 420 bp, Glycine max
gccatactttttgttcttttgaaaccatcaaatgatgaaataacccaaaccttgtaggattttatctattacttgggagtatattaggttgattagtttcttcttatttaacctgcttactttttgtgtgtgaacagatgcttaatgaaagtatagagcaatgtctatttccctacaaacttcaggtaatgcatgaataacatctgcaatttgtcaataactattttatccttcctcaagtttcaataccagctgttattggctcctgctggattaaatcctattgtaaatgtatagaaacaccgatggatgagtgttattttctttctcttttccctgctgggtcttggatgaagaaagttattgggagtgtattcccagttctctttttctgtattatcttccaagaaatatatttgg

SEQ ID NO: 29705 - DNA, 411 bp, Glycine max
tactaatggtattaatggaaatgctggagatggtgttcaagcagttgagaatcctgtgatgtccgagtctggtgcggaagtttgcgatttccctctagagcgttgcatgaggatagtgcctcatgatcagaacactggagccttcttcattgctgtactgcaaaaagtttctcctctgccagcaattacagaacaaacaaaaataaaaaatgatgagcaatatgtagaacccgcaaaccagagtcttaatgatgcacaagtaccacatattacttcatcagaaagtgcacacgaagaagtcttcaaagcagtgtctgaggaaaatgtagatgatgctgaacccaacactgaagatttggaagttggtcctgttacatgtgaagaacagaattccaaggaaactcatgaacc

SEQ ID NO: 29706 - DNA, 285 bp, Glycine max
  modified_base (189)..(189): a, c, g, t, unknown, or other
ggaggggtgaggaggaacttaatttgaacgtttccctctgactctgaggttacaagaatcctccacccaacctctgttgtgtttccggagattaggatctggttgggaaactgctatagaagtgtacggatctcatccatcggggcatagcttggttttgcgatgggttggagatacaacgctggattntcctcatagtcactggtgttataattggggtcacttccgccgaagttcccaaggatatttttccggattttaaccagccatttgcagtaccaaatt

SEQ ID NO: 29707 - DNA, 216 bp, Glycine max
gaaggagaaaaagaaatcaggagttccgcccctgcgtaaaatgttttcgcaccctatggaataaagacataaacttggtaatctcaattcatctgcaaatgatgttgggaggtgcaacagcaaggggcgtttccctgattaaacttcttcctccgttccgctttcgctttaaacacttctctggtctttcaaaaaccatttggttttaaggttatt

SEQ ID NO: 29708 - DNA, 209 bp, Glycine max
ggctcaagtgagtttgttgatcgagagggctagaaacagtgtgatgaaaatgaaggtgcttgatttcttcggtgctacaattttggtagcatggcaatgccatgcgtacgatatgttccctctgcgaatgaacactggctattgtgcccgtactccggaggtgaaatgcccaagtttgaagcttgctgtggaagcacacaacatttttg

SEQ ID NO: 29709 - DNA, 404 bp, Glycine max
gggtattctgagattacaagtttcagaggccgagggcgataatatttccatacggtttcttgacaggaagacaggtgagactactatggggaagacaaagcctgaaacaatacttaggcaaattacaaccaagaaaggacaggtctacagcatgcttgagggaaaaagagacgtagaaactgtattaactatgggaatcatggaagatgttagcattattccccaaccagctgatacagggaaggttgatttggtgatgaatgtggtggaacgtcccagtggaggattttctgctggtggtgggatatcaagtgggattacaaatggtccactaagggggcttattggaagctttgcctattctcatagaaatgtttttggtaaaaaccagaagctcaatattt

SEQ ID NO: 29710 - DNA, 397 bp, Glycine max
gacagcagagaaagaagcttcacaattcacattcccaccaacggaaccatggcctccgtgtacagctgtacggagtgcggatccaacctgaatcttaactccgctcatgcctaccctccagacttctacttcgaagtcggcaacaagggctccgtctccttctccgccgtggaccccaccaagttcaagttcgagaaggaggacaagcttcgccccttcttcgaaaccgtcaactactggggaatccagaggaagaggaccaagatcaagtgcaacacctgtgactgtctccttggctacgtctatgacgatggtccacctcttaccaatagtcccggtcaatttcacatgggtcctagccaagttatccccagagcgccaagatataggttcaaga

SEQ ID NO: 29711 - DNA, 338 bp, Glycine max
ggcttgaagaatgcttaaaggtctggaaaggacaggtatacaacatgaaggtgtcgccaacttgcttgaccatatacgaagggctatcattcttattcatagaatttcccactaccacgctgacctaagttgcaaccttgatccctatgcttgatacgcaactaaatacttaataattccctatctcacttacccaagctttgacccttggttatcacatcgacactatgtatcatcgatggctatatactagatccaccacaagttccattacctatgcaatctggcactcattgccgaatcctgcgatggcatatccaaccagctgttgcacttca

SEQ ID NO: 29712 - DNA, 158 bp, Glycine max
gggggacccgtgaatcaatatccttggggatagaatgtggggcttggtggtgaatctggtggaccaaagtggtcggtaggtattcctttggtcaagaatggtggatagattgattcattattttaacgtactttggagcattggatgagtgaatggcc

SEQ ID NO: 29713 - DNA, 230 bp, Glycine max
tggagctgctcatacaacactgcactgtagagcaagtgctgcgataaatctaggaagagactgtaaagatttcgaatccataatcctaagaaagggcaccaccgtatcaacaagtatacgcagacgctcgatatcagtccctgtctgtaacactaatgcctattacaatgccttactagaagtaaaacgcccctgcataaaaagcagtcactctatgtactcgactattc

SEQ ID NO: 29714 - DNA, 408 bp, Glycine max
gacgatgatgatgatgatgatgatgatgaggtagaatatgaggtgcacgtggtagataagaaagtggttgatggagataataatgatgggaacaaggccaaggagcacgccgcattccgtacccggagacctggttcccggaatccacttgaggttgctaaagagattcagattctatttcagagggcttccgattctggtgcccaaatcgccaagattcttgaggtcggcaagcttccccacaatcgaaagcacgcagcttatcaagcttcttccaagatgttacaagttgttgctccctctttgtcccttgtctcctcccaaccttctacttccaaagatgctgaatccgccttcgctgctaacatggattttaatgttgatctaacaaccggtgcacgcaatctt

SEQ ID NO: 29715 - DNA, 378 bp, Glycine max
cgaggaacgcagcaatcgcaagtcgtctgtcctgtcccgcgggagcagacgacctgtcttcatcgccaaaccacctcaaaaacattcatcaacgttcactattcatgcatccatcattaagtgagaaaataaggttcgattactctatctgtggtttgcttgtgatccatcatggaagtgcccagttcctgggatgcccttcgtatacatgctagaaaacttgaagctcagctggatgagcagatgaattcttatcgcaaattgggttctaataatgtttctacaaaagctgacgctgcagagagtgatctatagtcttggatttgagcgttactaaaacaacttcaacaagtttacacacagatgcaagcttgggta

SEQ ID NO: 29716 - DNA, 413 bp, Glycine max
  modified_base (300)..(300): a, c, g, t, unknown, or other
gatattaaagtcgtatattttaatgcatgctgtcgagcttgtgttactttgtgacaaatggagggtccttagttctgtttctctttcttctctctgtgctttcaaccaagttctcaaatcactcttcttcttcacccttctgatctgctaattctcaaggtattcaaaattgggtggttttcgattgaactgtgatgtccaagccactgctaggcatatcggaagatgaaggtcaaagcaatgtcactctgttggtttcttcctcatgcaccatggaaagtgtgtgcctgaatagctcanaactgaaagagcgcaactacatggggttatctgattggtcatctgtggacagctccgagccgtccttctcagatgagactaggagcaatctgaacctcaaggctactgagctc

SEQ ID NO: 29717 - DNA, 136 bp, Glycine max
gatgaacgtggtgagcgcgttaatggtgactcggaaccaactcggagcacctgaaggcatacccttcggatcggtatggttgttcgtctacgccgggatctccttttccctcgtcatcttcgccggaatcatgtca

SEQ ID NO: 29718 - DNA, 271 bp, Glycine max
gacgcaaaaggatggatgatggaagaaacaaagagaagggaaatatcaggaggtgcgagtaccggagccaaacgcgggtgtgtgtgtgtgtgagggagagagagatgcagttccattcagaaactccaaactaaacatccctggcgacaaccttaggaatctcgatcgctgaaaaaacctatgcagccccgaacacactctctgcattccaacttgtttaagtcatgcctttcgattcacccttctctcaataaatttttaatcagattct

SEQ ID NO: 29719 - DNA, 290 bp, Glycine max
ggttagtccagatggtacgcaattttccattacatggcctgatcggagaatacgtgcgttccggttcagttcaggttaactaaggcgaggttatgatgaatccctggaggctgctcatgatctgcaaagaagtgatgcttcattataccggttggaatccattgaatgtggttgaagaatggctgtcgagaaagaaattgagacgactgaaagtgctcttcttacaaatgcagtttttgactaaagttccgatgttcttatatatgcaaccttgcttgggattaaaattg

SEQ ID NO: 29720 - DNA, 198 bp, Glycine max
gggatatatatagccttttttagttacttactcttgttttgggttcaacatttacagcccaagtcaacttgtttgtggaatattttaatgctcaaaatgattacaaggtcataaacacggatcaatggatgggattttttccttattgcacttagattaatttttccaacccttaatgactatgaacctgaactttcc

SEQ ID NO: 29721 - DNA, 271 bp, Glycine max
ggattacagaatgcggaaatcggtacgggctatgtgagaaatactctgagcgaaaacaccacataatcctttcttgcattttacggccattgtatcttcactctctaactggtcttgaacatgtgcctgatacttgctacacctggagacagatactccttacttatgacgtgctacctatagcttcttgtcatttcggcggacgctgcccttgcacaaatgccttaccagtaaatgtctgcactggatatccacaacaatacttcacatg

SEQ ID NO: 29722 - DNA, 272 bp, Glycine max
gacgtaaaaggtttgatgatggaagaaacaaagagaaggggggtatcatgaggtgcgagtaccggagccaaacgcgggtgtgtgtgtgtgtgagggagagagagatgcagttccattcagaaactccaaactaaacattcctggcgacaaccttaggaatcttgatcgcttaaaaaacctattgaagccccaacacaattttttgatttccaactggtttaagcaatgcctttcgattaacccttttctcaataaatttttaatcaaatttt

SEQ ID NO: 29723 - DNA, 422 bp, Glycine max
ggggggtagattggggcgtggacatgagggtctttatgacacaatcaataattcaattcattttcaattaggtcttgctctagcctctttaggggttattacttccttggtagctcaacacatgtactctttacccgcttatgcatttatagcgcaagactttactactcaagctgcattatatactcatcatcaatatatagcgggcttcattatgacaggggcttttgctcatggagctatattttttattagagattataatccagaacagaatgaagataatgtcttagcaagaatgttagaccataaagaagctatcatatcccacttaagttgggctagcctctttctggggttccatactctgggactttatgtccataatgatgtcatgcttgcttttggtactccggagaaac

SEQ ID NO: 29724 - DNA, 434 bp, Glycine max
  modified_base (397)..(397): a, c, g, t, unknown, or other
gacactaaacaagttaaaagaagagcatcactgagctaacaaagcaaccctatgtcgaaggtggtttgtgtcaccggagccagcggcgccatcggatcatgggtggtcctactcctcctccagcgtggttacaccgtccatgccaccgtccaagatatcaaggatgaaaatgagacgaaacatttggaggaaatggaaggagcaaagagtcatctccatttttttgaaatggatcttcttgacatcgactccattgccgctgccataaagggttgttccggcgtaatccaccttgcatgtcctaacatcattggtcaagtcgaagatcccgagaaacagatattggaaccggcgataaaaggaacggttaatgtgttgaaagcggcgaaagaagcangggtggagcgcgtggtggcgacttcatcgatttcgtc

SEQ ID NO: 29725 - DNA, 427 bp, Glycine max
gctccaagacgtcaccgtctacgccttcaacgccaccgtggcgaacttcctcacttcgaattttcaggtcacgctcatctcgcgtaacccgaacgaccgcatcggtgtttactatgatcgcctcgaaaccttcgtgacctaccgaagccagcaggtaaggtccggaacggcattccttccgacatatcaaggccataaagagatcaaggttgggcctccgttggttaatggcaccaacatcccggtggggccgtacaatttcctgggcctaagccagaaccgaagtaccgttacacgcttggtcaccatccgagccgagggtagggttcgttggaaggtcggcacctatatctccggccgttaccacttatacgtccgttgcccggggtacatcagctttggaccccgcagcaatggaatcgtcgtc

SEQ ID NO: 29726 - DNA, 398 bp, Glycine max
ggaatcgaatcgatattggtgttttgttccgttctaagcatggggaaggaaggagatctatgggacgattcagtactcatcaatgccttcgaccaagctatttctacttacaacaaaatgcatagcagcggcaaacacaaagacgccgcctcggttcaagaggaggcgaagacactgatcggagaaaatggctccaattttgacactacaaggggtgctgatacgaatattccagctactgatgcgcttgattcaggtgagactggtaatttgtcgaagttggaagaaaatcatgacacagagtcacaggtggatcatctggattcaacaagtggtcaagacatccagaatgcacagaacggttatgcatatgctcaagctgtagatggttataaatc

SEQ ID NO: 29727 - DNA, 426 bp, Glycine max
gagggatagggatggagaaagtgaaggtgcttcggcgactcctcgagacaccaggggttcaccaggggccagcctgtttcgacgctctgggtgcgaagctcatagaatccgctggcttcccctactgcatcaccagtggcttctccatcgccgcttccaggttggctctgcccgacaccggcttcatctcctacggcgaaatgctggagcagggccaactcatcacccaagccgtttccattcccgtcattggcgacgccgacaacggctacggcaatgccatgaacctcaagcgaaccgtcaagggtttcattgccgccggtttcgcaggaatcattctggaagaccagattgcgccgaaagcgtgtgggcacacgcgcgggaggaaagtgataccgaaagaggagggcgttatgaagattagag

SEQ ID NO: 29728 - DNA, 445 bp, Glycine max
gagagcctgctgctgaaagtgtttgtgaagggaaagtggggagggctgggaagttggcgagtcccggtgacttgaattacccctctttcgcggtgaagttgggtggggaaggtgatttggtcaagaataaacgggttgttactaatgtgggaagcgaggttgatgctgtttacactgttaaggtcaatcctccacctggtgttggtgttggtgtgtctcccagcacgattgtgttcagtgccgaaaacaagacacaggcgtttgaggtcacgtttagtagagttaagttggatggctctgagagttttggctccattgagtggactgatggaagtcatgttgtgaggagttcaattgctgttacttggagctgtgcatactcatcgtccgtttgaatgaattgctgtggagacgacgtctttctcaggttatggattattggatt

SEQ ID NO: 29729 - DNA, 423 bp, Glycine max
gacatagatgaagtgaaaaatatcttaaaaaactgcggttatcatcccgaaattggaattgacattttgatcgaaagatgtttggtaactctggataggatgaagaagttggggatgcatgatttgctacaagaaatgggaaggaatattgtatttcaagaatctccaaatgatccaggcaaacgtagtagattgtggtctcaaaaagacattgattatgtgttgacaaaaaacaagggaactgatgaaattcaaggcatagttctgaacttagttcaaccgtgtgattatgaaggacgctggagcactgaagccttcttcaagacaagtcaactcaagttactcatgttatgtgatatgcagcttccccgtggcctcaactgccttcctagttcactgaaagttcttcactggagaggatgt

SEQ ID NO: 29730 - DNA, 431 bp, Glycine max
gactcagcagaaagagatcttgagaaccaaagtccccggcaaggtttccatgtacgtttgcggagtcactgcctacgacttcagccatctcggtcacgctcgcgctgcggtttctttcgatatcctcttcaggtaccttaagcacttgggctatgagattacatatgtgcggaatttcactgatgttgatgacaagataattaagcgagcaaatgagaccggggaggatccattgatgttgagcaaccgtttttgtgatgaatataatgctgatatggctgatctccagtgcgagacaccatctagggaacctcgtgtttctgaacaccttaacgagataaaggacatgataacccagattatcaacaatggctatgcatacgaagttgatggtgatgttttttatgctgttgataaatgcccaaattatg

SEQ ID NO: 29731 - DNA, 427 bp, Glycine max
ggtacaaaagggagggttaaattaagccgtttttcagtttcttgccgtaagtaaataggattcaagccattttatcgacatgagtgttctatatcgaaaaaaaaatctaataattttatcgaaaccatttcatttctgtattaacatagtggtagaaagagtactacactgcgtctagacttcaaactattcactttaaccatggtaatagtccaaaattattggttaatagagaatcaaagtggattaccaataaatcgcgaaatgctatagttcttaaatattttttcttaaattattgaaaaaatttcattaattcagaagtaattttcagaagtaattcgcgggattatgcacattttcttagttataactaaaaagtgcagtttgggttggatccaatctattctttgaaataaacaactcg

SEQ ID NO: 29732 - DNA, 418 bp, Glycine max
ggtgaaacttttcttcagcattgtcgtcgtctgcctctcactcctcttccttctcgcactgctattgccttcttcccttttctctcaaattcacatttatggagaagcctccttaggggaggtggatatatggagtgttcggagactcgtggaatggagaccttgcaattggtggctacaaggccatcaaacagacaattgctttcgtttttttgtttattcttgaaatggtgcagctctaccattacaaactaatggatatatcagagtggattgctatggggggctcaatcagatgcgaagagatttctgtgatggtgtgggcattgctcgtctgttaaatgcaacccttgtcttgccgaagtttgaagtggcatcatattggaatgaaacaagtggttttgcagatgtatatgat

SEQ ID NO: 29733 - DNA, 432 bp, Glycine max
  modified_base (282)..(282): a, c, g, t, unknown, or other
ggagttagggtgagttgcaggcagtgtcatctcgcctttgacgacaagatgagcatcccaattccccatcggcagttattcatagacggagactggaaagtccccgtcctcaagaatcggattcccatcatcaacccttccacccaacacatcatcggggatatcccagcagctactaaggaagacgttgatctcgctgtcgctgccgccaaagctgccctctcccgcaacaagggcgccgattgggcctccgcttccggctccgttcgggctcgctacctncgcgccatcgctgccaagatcaccgagaaaaagcctgaactagcaaaactcgaagctattgactgtggaaaaccgctcgatgaagccgcctgggacatcgacgatgttgctggttgctttgagttctatgctgaccttgctgaaaaattg

SEQ ID NO: 29734 - DNA, 420 bp, Glycine max
  modified_base (364)..(364): a, c, g, t, unknown, or other
ggcagccaagaaaagaaaatccggacccattttcttcgtagccaaacactctgaaattctcagttatgtcgtggcaagcgtatgtggatgatcacctactgtgtgaaatcgaaggtaaccacctcactcacgccgctatcatcggccaagacggaagcgtttgggctcagagcaccaacttccctcagttcaaacctgaggaaataactgccatcaataatgactttaatgagcctggatcacttgctccaactggattgtatatcgggggcaccaaatacatggtcatccagggtgagcctggtgctgtcattcgagggaagaagggtcctggtggtgttactgtgaagaagaccggtgcggncttgatcattggcatttatgatgaaccaatgactccaggtcaatgccacatggtag

SEQ ID NO: 29735 - DNA, 433 bp, Glycine max
  modified_base (397)..(397): a, c, g, t, unknown, or other
gacactaaacaagttaaaagaagagcatcactgagctaacaaagcaaccctatgtcgaaggtggtttgtgtcaccggagccagcggcgccatcggatcatgggtggtcctactcctcctccagcgtggttacaccgtccatgccaccgtccaagatatcaaggatgaaaatgagacgaaacatttggaggaaatggaaggagcaaagagtcatctccatttttttgaaatggatcttcttgacatcgactccattgccgctgccataaagggttgttccggcgtaatccaccttgcatgtcctaacatcattggtcaagtcgaagatcccgagaaacagatattggaaccggcgataaaaggaacggttaatgtgttgaaggcggcgaatgaagcangggtggagcgcgtggtggcgacttcatcgatttcgt

SEQ ID NO: 29736 - DNA, 402 bp, Glycine max
  modified_base (329)..(329): a, c, g, t, unknown, or other
  modified_base (332)..(332): a, c, g, t, unknown, or other
ggggtgcgaagtgaaatgttgcaaaccctaggaggcgtaatccctcgcttcgtgagtcgctcatggctccgaaacctgacggtgcgtgcaatggcattctcttcctcctcctccgattatggagaccagtcacgtggtggccttccccgcttctactccgaaactcttcctccttccaagggtagtgttatacgcgtgcaaggtgatgaattctggcatatgacaaaagttttgaggttaaccaccaatgatagggtacagctcttcaatgggaaaggaagtctggtagaaggatgcatacagagcattgatcgaactggacttgattntgntgcattgaatgatttgatatcaatccctccacaaaatacacaattgcatgtatttgctggttttggtact

SEQ ID NO: 29737 - DNA, 354 bp, Glycine max
gaaggaaatgacagctagtaaaccacatactacggaaccaatgcataatgtgcagtcattctctacaattcatttgagagagcccccttctgtcttgagaccattggagagcaattcagagaccgaagctgttgaaatcacagtaacaaagttgcttttgaaatcatactatgacattgtcaggaaaaatgttgaggatcttgtccccaaagcaattatgcacttcttggtaaataacacaaagagagagcttcacaatgtcttcattgaaaaactatacagagaggatctgtttgaagagatgttgcaagaacctgaagaggtagccaagaaaagaaaaaactgtcgagaact

SEQ ID NO: 29738 - DNA, 433 bp, Glycine max
  modified_base (328)..(328): a, c, g, t, unknown, or other
  modified_base (390)..(390): a, c, g, t, unknown, or other
ggggtgaagagaaaggtgtgctatttttatgatgcggaggttgggaattactattatgggcaaggtcacccaatgaagccacatcgcatacggatgacacatgctcttctagcccattatggattgctacaacacatgcaggtccataagccatttcctgctagagacagggacctttgtcgatttcatgctgatgattatgttgcattccttcgaagcataactcctgaaacacagcaggatcatctgaggcaactcaaacgctttaatgttggtgaagattgtcctgtttttgatggcctctactctttctgtcaaacatatgcanggggttcagttgggggtgctgtaaagttaaatcatgaccaatgtgatattgctgtcaactgngctggtgggttgcatcatgccaagaagtgtgaggcttctggat

SEQ ID NO: 29739 - DNA, 434 bp, Glycine max
gtgtgaaagaaaagttggtggacttctgtaatgtgctggatattccgataactaagaccagtatgaagaaggaggaactgtctgcaaagttgttagaatttttggagtccccacatgctacaactgatgttctgcttgctgataaggaaaagaaaggcaaaaagcgagccagaaagcaaaccccaagcaaatcccctgctaagaagcaaaagcaaaattcacaagttgggaaaaagcaaaagcaatcttctgacatcgaggacagtgatgcagctgaaccttcagatgcaaaagttgattcccgggaagatgatgattcaagtcaaaaaagtgaaggtggtaataaggaaagcatatcagagaaagaagaagattaagaaaaggttcacaaacgttcttaaaaaagattctgaaggaagatcaaaccacacctg

SEQ ID NO: 29740 - DNA, 440 bp, Glycine max
  modified_base (359)..(359): a, c, g, t, unknown, or other
ggacagaaattatggcaagaagagatcttgaaagtggcggtggagtaaccaagaacaacagaagtgcagaggaaaactactctgcgcccgaatcttcccatgtttatgattctgagacccattggacatcatggctcgtgcccatgtttgtggttgctaatattgctgtctttgttattaccacgtacatcaacaattgtcccaggaacaacattcgtttccaaggtcgctgcgtggcaaggtttcttggaaggttctcttttcagcctatgcaggagaatcccttgcttggtccttcttcttcaacattgaccaagatgggagctcttcgatgggataatgttgtgaatagacatcanggatggagacttgtcacttgcatttggttacatgcttgggttattcatttgctggctaatatggtgagtctggtcttcatt

SEQ ID NO: 29741 - DNA, 438 bp, Glycine max
gacgtcgaatcggtgtggtacggtgtgttttattcattagacaagattggaatgcaagtttaattgattaatactaataatcaatcatcgtagcgagatggtgtcgccgagccaggtggtgaaagtaaagagaaatacgctacgaccatgcatgacatgccctctctgccacaagttcttcaaagatgccaccaccatctctctctgccttcacaccttttgcaggaagtgcatatatgagaaactctcggatgaggagatggattgctgtcctgtgtgccatattgacttaggctgccttccggtggagaaactcaggccggaccataatttgcatgatataagggcaaaaatattcccttttaaaagaaaaaagatcaaagcccaagaagtttgtcttcaatatcattgcctgcaaaaaggaaggaaagatcactt

SEQ ID NO: 29742 - DNA, 430 bp, Glycine max
gggtctttttttattagcgaaaaaaggaataaaagaaaaagatgacggaaatgtcggaggcaaaagacccggcgatcaagctcttcgggaagacgatcccggtgccggagattctgccgggatccaacggagctccggcttcgtcttccggtgatgttgttgttgatgacagtgttgacgcttcttccaccaactcttcaagggagtctcataccaacacagatgcacaagagaaagattttgataaggacacattgggagaaaaaccaactgatgacaagaaggaagatggagcccccgcccaatcatcagaagaggtcgccaatccagatactgcctctggaacctgtgaagaatccatcatccagtccaccgagagggaggctactacattgaaaactacaaagactgaagaagaacagggcgagac

SEQ ID NO: 29743 - DNA, 438 bp, Glycine max
ggggagagtagagtaccattgctccactgtcgcgggccaccatgtctttctcggagttccgaccactcgacgacacgtccctcatcgaatacataaagtccgtccccgccctctcctccaaactcgccgacaacctcgacgacttatcagtcaaagaagtcggagatggcaatcttaacttcgtcttcattgtttccaaccccgcaggttcttttgtcatcaaacagactctgccgtacgttcgttgcataggggaatcgtggcctatgacgaatgagagagcgtattttgagtcgctggcactgaaagaagagggtcgtttaatccccgaacatgttcctgaagtgtatcactttgaccgtaccatgtctttgatcggtatgcgttacttggagcccccacatataatcctcagaaaagggttgattgctgggattg

SEQ ID NO: 29744 - DNA, 439 bp, Glycine max
gagaatgagaaggagagaatcccatgaagactcctctgccttacatggtcatatttggtatgtcaactccttttgtaatcttggccattgcttttgcaaatggttggattaaggtgcctgttcgatgagacaacactttacttctcattctcaaacttcaccagagaaattctttactttttcacatatgttatggctcgttttaatgaacaaagttcacttatgaatgtcggattgaggaaagcataaatgaggtttcttgtttcaagaatagcacgttggtgatccgaacaccggacctgcctgctaatatgaaatggttggtaatccgactgttccatggaaaattaacaatggaattttttacaccttaagtttttctttctttctgctccttgcttataaaacaggataaagaaaatgggaagaaggttagatc

SEQ ID NO: 29745 - DNA, 437 bp, Glycine max
  modified_base (242)..(242): a, c, g, t, unknown, or other
ggatgcaatagtagcagcaattcacactggtctgtgcttctcgtgactcatttctcacctaactttctattcttctcagtctcaggtcagaaccttagccatggcagcgttccagaagatcaaggtcgccaaccccatcgtcgagatggacggagatgaaatgactagggttatctggaagtcaatcaaggacaagctcattttgcccttcttggagttggacatcaagtattatgacttangccttccttaccgtgatgagaccgatgataaagttacaattgaaagtgcggaagcaactctcaagtataatgtggcaattaagtgcgcaactattactccagatgaagctcgtgtgaaggagtttggtctgaagtcaatgtggaagagtccaaatgggacaattaggaacattttgaatggaactgtcttcagag

SEQ ID NO: 29746 - DNA, 415 bp, Glycine max
  modified_base (280)..(280): a, c, g, t, unknown, or other
  modified_base (387)..(387): a, c, g, t, unknown, or other
gagcttcagcaacaataaataaggaataatcataacaccgttcatcaatggcggttcggctgcattcctagactactctctttttccgcaatttttcattggctgcgttcgttcgttcgttgcgtgctttagttgttacttttccgttacggcgatggagttggagcacccgaccgcgacgccgctcaactccgccatgacctacgacgaagcctccatggagcgcagcaagagcttcgtcaacgccttgcaggaacttaagaacctaaggcctcaactntattctgctgcagaatactgtgaaaaatcttatctccatagtgaacagaaacaaatggtacttgacaacctgaaagactatgctgtaagagcccttgtgaatgctgntgatcatctaggaacagttgcatacaag

SEQ ID NO: 29747 - DNA, 410 bp, Glycine max
ggatttgggatgttttatcaagggaagaagtggtggacattgtagcacctgctccacggtctagtgctgctagagcactggttgagtcagctgttcaggcatggaagacaaaatttcctttttgtaaggttgatgattgtgctgccgtatgcctcttctttgattctgattcagatttcaagtcaacagataccaaagacaagttgataccggaggcatctattgaccaatctgagaagtcatctttacttggtgaaaagggagttggaatggaagctgaaaaacagcagcaatagctcaagttttgtaccatgtctctcccaaaccttgctggttttatcgagaaggttgggtaaatggtgctgcaacaacagtcaacagagaaaggatcattattttgatgatttttc

SEQ ID NO: 29748 - DNA, 433 bp, Glycine max
gatgcgaagcaatgaccatacggtctcagccgggcatggagacatggaccaaaacactcgtgacatcatcatgcgggaatttcgctctggctcttctcgagttctaattaccactgacctcttggctcgtggtatagatgtacagcaggtgtctttggttataaactatgatctgccaacccaacctgaaaattatcttcatcgcataggacgaagtgggcgttttggaagaaaaggtgttgccataaactttgtgactttggatgatgcaagaatgctgtctgatattcaaaagttctacaatgtgactgtataggaattgccatcaaatgttgctgatctgctctgatgggttaattttcattccttggtaaagtcatcagaaggctattacttttttggcaattattaattttgcgcttctttgtttttt

SEQ ID NO: 29749 - DNA, 339 bp, Glycine max
gaggagctgggagggagtgtgatgaaggtgtgtgctcttgggaactttcaggactcattaagggctttgttgtatttggttaggtttccaattggtgccaagtcacttgtgaatcatgagtggtggattcccaaaggggtttatgtgaatggccgtgctattgagatgaccagcattttgggtcccttttttcatatcagtgctcttcctgatcaagcttttttcaaggggcagcctgatgttgggcagcagtgtttttctgatgcatcaactaggcgaccagctgatttgttatcttcattttccactatcaaaactgtcatgaacaacttatatgat

SEQ ID NO: 29750 - DNA, 419 bp, Glycine max
gatggaccattgaggagtttggacgatcctcaaaatgcctcatttttagagagcataaaaaaatctgagtgtcccaaagagcttgagcctgaagataggaggtcatctgttaatgttaacctcatacggaggaatgagaactatcgtgaacccgaaaagcagcatgttgcatttcagggagtgggaagaactcttggaagcagctctacatcaatggctcctgactctcctgctgcctcaacacctaccaatgcagcgccaactccttctgctggtctggtagttgatcaatcattgccatcaacctcaatacaactcaggttggctgatggaacccgcttgatatcacattttaattaccaccacacaatcagcgacatccgtgccttcattgatgcatctagacctgggggtcggca

SEQ ID NO: 29751 - DNA, 284 bp, Glycine max
ggatgtgagcaagagtgaagagcgaagagaatggctcccaagggggtaatctttttggctgtgttatgcttctcagcactgtcactgagtcgttgtcttgcggaggataatggacttgttatgaacttctacaaggaatcatgccctcaggctgaagacatcatcaaagaacaagtcaagcttctctacaagcgccacaagaacactgctttctcctggctcagaaacatcttccatgactgtgctgttcagagttgtgatgcttcactgttgctggactccac

SEQ ID NO: 29752 - DNA, 110 bp, Glycine max
tttcttttctcattatcccattcataatctccatccacaacctacctacctaccatcacacttaaccctatctcatccatcctaaagccatctcaaaactcaaacttcaa

SEQ ID NO: 29753 - DNA, 264 bp, Glycine max
ggtgaatttaattgaaattgaaaggttgctccgggggttccctttcgcagttgagatttgagaattgactctgagaatcgagaaaatggccggtttaccagcgaggctccgtcttcaacccaccgacgtcaaagccgccgccttgtggggcgttaccgccgccactggcgctctctacctcattcagccatggggatggttgaagaagacattcttggagaagccagaacctgagcaaaaatgagttggcttctgagaagagtg

SEQ ID NO: 29754 - DNA, 381 bp, Glycine max
ggatcgcagtgggtatagtagatgaagggaaagggacagcagccagcttcgggactcacggaaccttctaggctatatataaaaaaaaaaaaatattgcacgctcctccgggctcctggcatttcaaattcaaggcctctttccaatcttcaaagcagctactgcggcagctccattttccaattgaagttagcagagcagccatctgtgtgtgaaggggacatgatggatggttcccaaaagcgtagaatcctgatggtctcagattttttctatcccaactttggaggtgtggagaatcacatatattatctctcacagtgtttgctcaagttaggccacaaggtggtggttgcaactcatgcttatggaaatcgatct

SEQ ID NO: 29755 - DNA, 344 bp, Glycine max
  modified_base (330)..(330): a, c, g, t, unknown, or other
ggagctgaagaaagagagaacttctttggagcaggcagtcaaagaagtggctttgcttcaagaggaattggagaagaaaactgccgagtttagagaaacaagtgccgttcttcaggttaaagagtcagagcttgttgatgctaagctagaaatccagcgtttgaaatctgaaaaggcttctcttcagggtatcttggaggagaaagacttggagctttccagtgctaggaaaatgctgggggatgttaaccaggaaatctatgatcttaagatgcttatgcacagtaaagaaacccagctcattgaagcaaacagtatgctaagggacanagatgagcatgtga

SEQ ID NO: 29756 - DNA, 369 bp, Glycine max
ggaaacgaacgggacgtgtctgtctccgatggcgtcctcataccgtgaccgcacgtcggagttccggttattattggagactctgaagaagatcggaagtccggtgcaacccgagaatgctccttcgacctctcatggcgagtcgtattcgagatccgaattcaaccgaaaggcctcgcgtatcgggttggggatccacgagacctcgcagaagatcgcgaggctcacgcagctggcgaggaaatcgtccatgttcaacgatcccgcagtggagattcaggagctgactgttctgatcaagaacgagatcacggcgctcaactcggctctcttcgattttgcaaccgtcagaacacggatatggctgac

SEQ ID NO: 29757 - DNA, 371 bp, Glycine max
ggaagaaggaagcatcataaccggccaaagcttgggtctcttccatttatcccccataaataaaactaggtgaaaaaaatataccctgtgcttctcatgatgatagtgtagctgaagctgcttctgctgcagcattggtgatttggacacaaaaaaagtttcaaacttttcagttctctgagcttctggtttatcaattttgaaggagttcaatactttaccctattagttggttccctgaaatttgtattggtattgctgtatcagaaattcttctgaacaatctctttaatcaaccatgtcattattggctaaactacgctgtgtcaccatagatgttactggtaccctaatggcttacaaaggggagc

SEQ ID NO: 29758 - DNA, 381 bp, Glycine max
ggcgttcattttgtaatatagaagcaagaaagatagagagactgacaacacctctctctctctcccctcgttgatcccaaatctattaggggtttttattcgatgctattcggcctgaagctttcgtttcgcggatttttttaattattttttttcctgcctatcaggttagattgtgtcttgtaatgttcgcagattttattttcgtttctgttgttgcgttcaaaatcatttgttcaggtttgaatttttttccaatgttttttaaggaatatgaattttggttgggtggaaaaatggatattatcagttatgcatgcagatatgagatatgtactaagggtagacaagtaggattgccatattcaatttttaatatgt

SEQ ID NO: 29759 - DNA, 304 bp, Glycine max
gacattgagagttgagaaggagggatacttgagacgttaaaaattgctaaagacaagccatcaaaatccttgacagaaataaaggtggaggttgataaacttgccaagaaggttgcactttggatgctgctgcttccacaggtggggttatagcagagttagatatagagactttgaccgagaatctgatgagaacattgattgcattggatgaaattaatgctgagggtgaactgaaattgcagagaagatagcaggttaggagagatcaaaaacacattgagactctagatatggtgaggat

SEQ ID NO: 29760 - DNA, 211 bp, Glycine max
  modified_base (6)..(6): a, c, g, t, unknown, or other
gatggngaaagggaatatcatctataggaagctgagatggcatccaagacataaaagtcatcacaccacaacccacagattcatcatggaatagccacatagatcgactaataaacactctgtctttgacttttcataaggtcgctgacgtatcgcattcaaaaaaagttcatacattctcgattattccagaaagcacagacaggaaaac

SEQ ID NO: 29761 - DNA, 355 bp, Glycine max
ggcagaaatggggaataacagacaaaggagattgagaactcatcgcgcacaatcaagtcgacaccaccaccaacaactcttactagaggacgattctcaaagctctcttccagcacaaaatggtgagggcgaggaagaggaggaggaactcacggaacctaaaataaagcttgctatgtgggattttgggcaatgcgatgccaaaaagtgcactggacgcaagctttcaagattgggcatgctaaaatccggctggaaatcaatgtgtctcaagagaagattactctttaatccataagaaaggattggctggtgtggattgatcatgggcacgcttagatgacgtgcctttcgt

SEQ ID NO: 29762 - DNA, 397 bp, Glycine max
ggagcagagccgatgtggtagagcagttcctcccagaccacaatgaatccatttctgcagttcttgacaagtttggtgccatgggaattgacacccccggcgtagttgcattgcttggagcacacagtgttggtcgaacccattgtgtgaagttggtgcaccgtttgtacccagagattgatccagctctgaaccctgaccacgtccctcacattctgaagaagtgccctgatgccattccagaccctaaggccgtgcagtacgtgagaaacgaccgtggcacccccatgattctagacaacaattactacagaaatatattggacaacaagggcttgttgatagtggatcaccaactagccaatgacaagaagaccaaaccttatgtgaagaaaat

SEQ ID NO: 29763 - DNA, 349 bp, Glycine max
ggtgtgagagagcgagcgagcgagcagtttcaaagagaggatttgggattgggaaggcgagggattgcgctgcgtctcttcctcttctctttcgattcatccctcattcataatcttccaatccaacaacctcagcctcacactcacacatacacacatctgaacgcgtatcgtccctcccatggcttcaaagcgcatcctcaaggagctcaaggacttgcagaaagacccaccaacttcttgcagcgctggtccagtagctgaggacatgttccattggcaagcaacgattatgggtcctgctgatagtccttatgcttgaggtgtattcctagtcactattcacttt

SEQ ID NO: 29764 - DNA, 427 bp, Glycine max
  modified_base (331)..(331): a, c, g, t, unknown, or other
  modified_base (397)..(397): a, c, g, t, unknown, or other
gacgatggtggtggtaggcatgctgcgaatgggagagcacagcctgactctttctcttctcagcaatggcctcagagttacaaagagactacagattcttacacaatagctgctgctccaaattttgagtcagttctgcgggggccgagttttatatattctagttttgacaatcgttcaaagagtaacttagacatcgatggaaagacaccttttctgtctgctccagaaggcattagacaatcaacttggtgggagaaagcctcagtagaacggcttgtttccggagaattgcctattggatatggatgcagcttcactcaaacaattntcaatggcattaatgtgatagctggagttggcctctatctacaccatttacagtaaatcaagctgngtggatgagcttggcagtgatgcttctttt

SEQ ID NO: 29765 - DNA, 382 bp, Glycine max
gtgcgagttgtttatttcaaagaatagattggaggcaaccaaactgcactttttagttataactaagaaaatgtgcataatcccgcgaattacttctgaaaattacttctgaattaatgaaattttttcaataatttaagaaaaaatatttaagaactatagcatttcgcgatttattggtaatccactttgattctctattaaccaataattttggactattaccatggttaaagtgaatagtttgaagtctagacgcagtgtagtactctttctaccactatgttaatacagaaatgaaatggtttcgataaaattattagatttttttttcgatatagaacactcatgtcgaataaatggcttgaatcctatttactta

SEQ ID NO: 29766 - DNA, 406 bp, Glycine max
gggtcgcgagttcaagtcaagaagcctcacaagtcccgcttctcttccaaatcttctcgcaatcttcataaaacctctgtcaaggacagactcgcaatcgcaaaatcagagcgcaatgtcggcaaaggagctcgtgcagctcgaattcagagaaataaaatgatacgagatcaaaaaagagctgctgttttgaaagaaaaacgagaactcagtgggtcgagaagtcctcctcgagtgatagttctcttcgccctctgtgcgtctgtggatttagaatcacttgctgatgatctcttgtcattattatctaaagatacgtgtgtggtgctgtcaagaaccgttgcttcttcttgatataggacaagaataaccgtactaaaagcaccccatggtgatctactatcat

SEQ ID NO: 29767 - DNA, 316 bp, Glycine max
  modified_base (139)..(139): a, c, g, t, unknown, or other
gggtcgcgagttcaagtcgagacgccttacaagggcggcttggcttccaaatcttctcgcaatcttcataaaacctctgtcaaggacagactcgcaatcgcaaaatcagagcgcaatgtcagcaaaggagctcgtgcanctcgaattcagagaaataaaatgatacgagatcaaaaaagagctgctgttttgaaagaaaaacgagaactcagtgggtcgagaagtcctcctcgagtgatacttctctttcccctctgtgcgtctgccgatttagaatcacttgctgatgatctctttgcattattatctaaagata

SEQ ID NO: 29768 - DNA, 293 bp, Glycine max
tggcaggggcacaaagaaagaacagggtcaacaaatcatcatagacattaaggtgttcaaagaaagcactaatgttgacaaggtggttgtcctgtggacagccacacacagagaggtacaagcacctaattgtgggactaaacgacaccatgtaaaacctatttgcttccttggacaggaatggggatgagatttccccttccaccttgtatgccattgcttgtgctatggaaaatgttcctttcatgaatggaagcccgtcgaacacctttgtcccaggactcattgatctg

SEQ ID NO: 29769 - DNA, 405 bp, Glycine max
ggaagtcatcagaagtcaaaatagacaaaggtgggctccccctcaataatatcccttcggctgtggcgactaatggagctgaaattcatatggcatttcagttgcagatgacaaccccatttcagaaacaaccaattttgttggcttttggtagcaaatatccacagaaccaccacctctccaagcatgaagacaaaacagctattgtgtttgacttctctgcaggttctacgggtcctgtatcccgtgaattgattcagatgaggacgaaccatggaattttggctataatagggtggggtctaatcctgcctgtaggggctattattgctagatatttcaggcacaaggatcccttatggttctatctccatgcgatcattcagtttggaggattcacatttg

SEQ ID NO: 29770 - DNA, 381 bp, Glycine max
gggacgaacgaagggcaatcagttgctcgctcggtcgatccattcttgaaattctcgttatcgctcttcgaactcaagctctctcgctcgcgatttctgcttctgcaccaatttctgcggtttctcaagatttagaggttcaaagtggttcattcctttgaagcatgccggggttaacgtgcaacgcttgcaacaccaaattcaaagatgacacagagcaaaagctccattacaaatccgagtggcatcgatacaatctcaagcgcaaggtggctggggttcctggggtgaccgaggcgctatttctggctagacaatctgagcttgctcaagagaaaaataaactgggtgaaacccccatgctctacacctgtggtcttt

SEQ ID NO: 29771 - DNA, 179 bp, Glycine max
gcttctcatgagtgatgaacattatagaaggcggagcttgcattcaagacataaagactatcacaccacataccacagctccaccatcatatggcctcatatatacccataacaacactcgttctctgacacctaatagggccactgacagatcgcatataaaaaaagtctatacataa

SEQ ID NO: 29772 - DNA, 365 bp, Glycine max
gatagaaatataattgaaaggaatattcgccttaaaattcagcaaagtcctgattatgcagaagagccagattttgagactggattgcaagacttcaaaaatcgtctagaaaattatgagaaggtttatgagacagttaatgaaggatcttacataaaaatgattgatatggtcagtgggcatggtggacaaatacaagtgaacaatatcagtggttaccttcctggacgaattgtctttttcttggtaaatacacatcttacaccacgcccaattttacttacccgacatggggaaagtcaggataatgtgagaggcagaattggaggggatacctgcaatagtgaggcctgagaactttattc

SEQ ID NO: 29773 - DNA, 412 bp, Glycine max
ggttaagaaaaagagcgtgaaggtcgggggagggatagggtttgcctttaccctgctttgctctcggtggtgtcactgattggcgttgccaaatttcctttggcttcttcttctccgaatctttcagaatctctctctcatttatttttgaattgaagtttctttctcattatctaaaatatcctcgcgcgtgttattagcgatgccggaggaagaagtagtggagctcaagttccgtctctacgatggatccgacatcggtcccttccgttactcccctgcctccaccatcgccatgctcaaggaccgcatttttgcagactggcccaaagacaagaagattataccaaaagcagcaaatgatataaaactgataagtgcttggcaaatttttggagaaccacaagacagt

SEQ ID NO: 29774 - DNA, 435 bp, Glycine max
  modified_base (345)..(345): a, c, g, t, unknown, or other
gggttttatgatgaatgtaagcgaaggtttaacgtgaggctttggaaagcctttaccgactgttttaacttccttcctgtggcagcccttatagatgataaaatattgtgcatgcatggtggtctttcccctgaactcacaaacttggatgaaatcaggaatctacctcgtcctactgcgattcccgacaccggcttgctttgtgatttgctttggtctgatcctggtagggatgtgaagggttggggtatgaatgacagaggagtgtcctacacctttggccctgataaggtcgctgagttcttgacaaagcatgacttggacctcatttgtcgtgctcatcangttgtagaggatgggtatgaattctttgctgataggcaacttgttacgatattttcagcttcaaactattgtggtgaatttgacaatgct

SEQ ID NO: 29775 - DNA, 380 bp, Glycine max
gacgacagaaggggatagcaaataaacataacaatttatatatataaataggggattttgctttagatattttgagtaacatggcatccctcaaggctgacaaacccgttggcactcaactttttgggcagggtaaaaaggaagctgctcccaaagctagtgatggtgcatcatccaaatccaagggttcagcttccaaatctgctaccaagaaagttccagtacagaagccccaagaatccaagaaaaagggaaaaggaggcaaatcatctacaaagcactagccagaaagccttattaatttactgaaggaaagtgtggtttaattgtaagaataaaaagccacacaaatattggatacaataaaaattgtaccttgt

SEQ ID NO: 29776 - DNA, 393 bp, Glycine max
ggtgagaaaagaaaagaagaaggaagccccagggcgataatcatactcgtacttgagatgatattggataatctcaacctcaattttcctcaataaacaatcaccttcactttttttctctcctcttcatttctgaactcatccccatggatccctttgatttgatacgcgaagggtttggttgaggctgactggacatgtgctgttactacttataaagtctgtttatgctgtagtagttattttgtctatattttagttaataatgaacttaaccaagaaaggacccctaacggatgcaaagctattaagcccaaacaaggcaactactctgaatccaaatgcagcagaagttgttccttttgccctcagatcatcattattatcttgaac

SEQ ID NO: 29777 - DNA, 409 bp, Glycine max
ctatgaacatgatgatggaaagggtgccttaatctgtgtcacttgtggagtttcctactttggtcttgccttggtcaaccatctcttgctcttaggttactctcttcgagtcaccgttgacaacccagaggacatagagaagctgagggaaatggagaggcgtggtgaagtgagggctacagaaggaaatttggaagtaataatggcaaagctaactgatgttgatgggttggagaaagcatttcagggctgtcgtggcgtctttcacacttctgcatttacagaccccgctggtttatctggctacacaaaatccatggccgagattgaagtaagggctgctgagaatgtgatggaagcatgtgcaagaacaccttccataacaagatgtgtgttcacattatcacta

SEQ ID NO: 29778 - DNA, 377 bp, Glycine max
  modified_base (363)..(363): a, c, g, t, unknown, or other
gagagaggaagagtgaaaatgaaaatgagaagggggtcggggggaatattgaacacaacacccactgcacagcttcataactaaaccgccatcgcctccaagactttccgtgcccaaaagatgagaaaacgcagcatttacgcatggctagtagcacttgtttgcttcctcctactcatgatcgtcaccccagccattccccagtcacaagaataccatgatttcgccgaccaccgcaccttcctcggtattcccaatgcacttaacgtgatatccaatttcccttttctggttattggcctcgttggacttgtactctgtcatcatgggaaatactttaggctcagctttgcaggtgaactnatgggctggacatg

SEQ ID NO: 29779 - DNA, 320 bp, Glycine max
  modified_base (312)..(312): a, c, g, t, unknown, or other
aacatgaacgagatccttaatataagtacctgaactgggtgaaggtgcatctcgggggagactatccaacatcattccaggaggatcattgtgttcaatcttaaatgatgatgacagggatgcctgaggtgatccactgtcttgataacaagacgtggaggatcctttaccactgacttgaagcagatcatgatcttttggattgtctgggtcctcaaaagcagaaggttgtgtgtcaaaatgtggtgaatccaaaattatctccggctgttggcttaagaaattaagacgcatgtcacactggataagctnttcaaaat

SEQ ID NO: 29780 - DNA, 395 bp, Glycine max
gaatggaaagatgctaatgacaaagtgatgcctgtgaaacaatggcttgaagaacgacgattcttgcagggagagatgcagcaacttcgggacaagcttgctataactgagcgaactgcaaagtctgaagcacagttaaaagaaaaatatcaattaaggcttaaagtgctacaggagagtttgagagaaacttctaacagtattaatcgcggcacctcagagggaagatgtgttagcaatgggccttctcgacgtcaatccctaggtggagctgataacatctcaaaactaacatctaatgggtttttgaagagatcaccgtccactcaaattaggtcttctgtgtcttcaagcacagttttgaagcatgctaaaggcacatctaaatcatttga

SEQ ID NO: 29781 - DNA, 314 bp, Glycine max
  modified_base (21)..(21): a, c, g, t, unknown, or other
gaagaacgactattcttgcangtacagatgcatcaacttccttacaaacttgctataactcagccaactacacactctgaagcacagttaaaagaaaaatatcaattaaggcttaaagtgctacaagagaatttgagagaaacttctaacagtattaatctctgcaccttaaacttacaatattttaacaattggccatatcaacttcaatccctatgttgagcttaatacatcttaaaacttacatctaatgtttttttaagagatcaccgtccaatcaaattaatttttttttttcttcaaacacaattttt

SEQ ID NO: 29782 - DNA, 415 bp, Glycine max
cggtacagaactgagtacttcaaattaggcctcgttgcagcgtcgacgaaatgaatcgccttcttcttgttcgtcatcctctgctagctctatccaagccaccattatcacccttttcccaaacctattattattcatacacgccggcacgaataaattctgaattatataagattaaggacccacctggagtctcttctgttcacacaagctctacattttgcactaccaacaaagacttatcaactgagaactgtgtaccgtgcaatacaaaggacttgcagcccatgaccgaggatgcagcacgcacaatgcttcaacaggtttatgttatccttaaaacattcaactcaaattgtttaaatccttgatagcagccagatagcagaacaacagctatttttaaattttttat

SEQ ID NO: 29783 - DNA, 372 bp, Glycine max
gtacgatccagagggatattctctggggttctgtgattacaaatacaatgatgagaacacagtttcctttgttacgttaaacaaggttggtggatttcttcagaggatggatctggctcgcaagtatgcatttggaaagatgctggtgattggatcacaggcaccatttaaggtgaaggggttgtggcttttccgtggacaagagattccaaaatttgtgattgatgaatgctatgatatggagctctacgactggaccaaggttgacatctctgatgaaactcagaaagagcgcgtcaatcagatgatcgaggattttgaaccatttgagggagagtctctttttgatgccaagtgctttaagtgagaaac

SEQ ID NO: 29784 - DNA, 352 bp, Glycine max
gatgtaaagatcattaagaaacttcccaaagaattggttaatgcaaccagagtcgtcaagcaattcataagctggtctggcatggattactatgagaatgagattgctggcttgtgggaagattaccaagttattcgagcttccaaatctgattcacgattagcaaacaacaatctgcctccagacattcagaagctccgctgccgggcttgttatgaagcacttcgcttctctcctcgcattgaacaaatgggaaaattattggtggagaggatgaggtcatttggtccttatattgcattgcatttgcgttacgagaaggatatgctcgcatttagtgggtgcactcatg

SEQ ID NO: 29785 - DNA, 380 bp, Glycine max
gaaggcaggtaggtggaagcagtctattgctttggcaaagaaggataacctttacaaagatgccatggagacagcctcccaatccggggagcgtgaacttgctgaggagttgcttgtttatttcattgatcagggaaagaaggaatgctttgcctcatgtctatttgtttgctatgatctcatacgggcagacattgttcttgaactagcttggatgcacaatatgattgactttgccttcccatatctattgcagtttattcgtgagtacactggcaaagtcgatgaactagtgaaggacaaaattgaagcacaaaatgaagtgaaggctaaagagcaagaagaaaaggatgtagttgcacaacagaacatgtatgctc

SEQ ID NO: 29786 - DNA, 301 bp, Glycine max
ggatgaagatgatcctgaagttgtgtttgctgggaagaagaaggggaagaataagaaaggtggtgggagcagtgcgttcactgcttctggctttgatttgctcggtgatgagagggatgatgatgaagagaaatccgggttaaccggtgaggttgatggtgaggaagaggatgaacctgtggttagttttacggggaagaagaaggcatcgaagaaagaaggtggtagtttgttcagtgcatctgcttttgatgctattgatgatggtgaggaagaggatgggccaatgattagttttaaa

SEQ ID NO: 29787 - DNA, 276 bp, Glycine max
gagatgaaggaggattccagtgtgaggaagtcgtttagttatgggaaactggcatatgccaatgctggaggggcgtcttactctagcgtgacggtgaatgatgagggtgaggactgggtttactacagcaatcatagatcagatgttgggattttgcataaagagaattcaaccgtgtcaacaaccgagccttctgtgttgcaaagctcaaggcgtagtatactgccttggaagaagaagaaagtgagtttcagatctcctaaatctaaaggggag

SEQ ID NO: 29788 - DNA, 380 bp, Glycine max
gacaccaaattttgcaacttggtttccaattgcgtgcacccatgtcctcttttctgtccttatcactctctgcgccctccctccacgattcttccttcctccatggaacaaagctctttcccttttctcgaagagtggcaccacgccgcttcaactcttcctctgccaagtgctccctcgaccacatccccaaacagttcagaaaggaaaatctcaaagatggattgatggaaaactacaagaatgcacctcaatctctatatggcctttctccttcacaaatggacatgttcatgacagaagataatcctatccgtcagcaatctgaaagagttacagaggaaagcatctcgtctgccaagaattatattgataatggt

SEQ ID NO: 29789 - DNA, 233 bp, Glycine max
tagatcgattgcgatgaggcatgctctttcaaggggtaatagtaaattagttgatggcgctttctttagaaccagaaccaactcgcctagttatcaatattgctgcgtggaatatacactaccaaacatcctacacacgatgcctatgaaccacacctggctcttcgtgggatcactacatgaaccacactagagcatattagatgcgtgatgagttgctgaactacatgata

SEQ ID NO: 29790 - DNA, 325 bp, Glycine max
gagtacaaatccatggtggcatgctctctcaatgctcaattgaaattccgtcaaagccaccttcttttgattcaataaatcaacacccaattgtcaaaattccaacttgtaatcaattgttctttccatctgacacaccataccaatcaaccaaccttgttgcttcttgtgatcactcctgaaccacactaatggatattgatgagtgggagtttctctctgatgatggctaccttgatttcaatgaagagggtgggaagcaaaagcaaaagcatgattcctttggaaaattggactccgagggcaattttgacatggactactt

SEQ ID NO: 29791 - DNA, 334 bp, Glycine max
gaacaaacaggcaaacaatgctctcttcttccattttccttctcaatccaccactctaaccctcgcacgcttcgttcaattacaaaaatggacagatcaactggccgtggtggtggtggaagtgtggacatgtttctccgaaattataagttgggaaaaacactcggcattgggtcctttggcaaggtgaaaattgctgagcatgtacggactggtcataaagttgctataaagatccttaaccgccacaagattaaaaacatggaaatgggagaaaaagttagaagagaaatccaaattttaagattgtttatgcatcatcacattataagac

SEQ ID NO: 29792 - DNA, 354 bp, Glycine max
gacagacaagggtttcttccgggttcacgtttcgcaatcactttttgcgcttctctcactcactcactcttcttcctcttcgtgtggttttctttctcgaactcgaacgaagatgcgtgagattcttcacatccagggagggcaatgcgggaaccagatcggagccaagttctgggaggtggtgtgcgcggagcacgggatcgattcaacggggaggtaccaaggggacaacgagttgcaactcgagcgagtcaacgtctactacaatgaagcgagttgcggaaggttcgtgcctaaggcggtgctcatggatctggagccagggaccatggacagcgtcagatctggtcccta

SEQ ID NO: 29793 - DNA, 395 bp, Glycine max
  modified_base (312)..(312): a, c, g, t, unknown, or other
  modified_base (360)..(360): a, c, g, t, unknown, or other
gtgagaagtgttaatgccaaggagcggacagcttgtgtgaggtggttaaaaaaagttgccagagcagaagatccacgagagtttgacaaggaggaagttgtaagtgtgtatgagctagagggccatccagattatgattactgctatggggatgtggttgttcgcctgtcacctgtgtctgtctgtttagaaacagcttctgttggagagtccactgagaaatcaacacagaaaattgaagagagtgggattaaaatcaatgtaaacgtccaaactggtgaaacttgtgtgcaattttctgacctgtcttgngttggaaatataactggccttaagaatggtgatattgaagttacttgngctgatgggatggtatcaatggttggaccccaagc

SEQ ID NO: 29794 - DNA, 193 bp, Glycine max
  modified_base (17)..(18): a, c, g, t, unknown, or other
  modified_base (26)..(27): a, c, g, t, unknown, or other
  modified_base (34)..(35): a, c, g, t, unknown, or other
  modified_base (49)..(50): a, c, g, t, unknown, or other
  modified_base (58)..(58): a, c, g, t, unknown, or other
  modified_base (60)..(61): a, c, g, t, unknown, or other
  modified_base (69)..(71): a, c, g, t, unknown, or other
  modified_base (85)..(86): a, c, g, t, unknown, or other
  modified_base (95)..(95): a, c, g, t, unknown, or other
  modified_base (97)..(98): a, c, g, t, unknown, or other
  modified_base (114)..(116): a, c, g, t, unknown, or other
  modified_base (124)..(125): a, c, g, t, unknown, or other
  modified_base (135)..(135): a, c, g, t, unknown, or other
  modified_base (137)..(138): a, c, g, t, unknown, or other
  modified_base (155)..(156): a, c, g, t, unknown, or other
  modified_base (176)..(177): a, c, g, t, unknown, or other
gttgcttacccaatttnntggtagcnnatggcannattgccattgcgtnnacgatatngnnttccctcnnntccgaattgaacannctggctatngnngtgcccgtaccttccnnngaggtgannaatgcgcaangnnttggaggcttttgctgnntggaagcacaaaacaacatnnctttggcttttttgag

SEQ ID NO: 29795 - DNA, 397 bp, Glycine max
gaaatagaagaggagataaataatgttactggagatgatgttttactacacctcaagaatggtgatgctgaagaatttgcagttgcactcttaaggctaaaaaagttcatcaggggtggaaaactggatagcggtttaattaacgtggaagctgctgtttccattctttttaaccgtctattttcatgtaagacaggcaatagattgacaatcattcaattgctaagaagtgttgctttgcaaaatgatgagatgaaggagaagatgacaaagaatgagttattatcagcagtggtgaaatctctaacaagagacactgaagagaggaaggaatcagtgggactgttgctagaactctctgaccttccttgcagtagacggaagattggaaagaatc

SEQ ID NO: 29796 - DNA, 421 bp, Glycine max
ggaggcagaagagattagagaagacaactatggaaggagaaaatggaaagaagctgaaaatattgtgcctccatggattcagaacaagtgggagttttcttaaaaagcaaatcagcaaatgggatccttctatattcactcaatttgatatggttttcccagatggtaaataccctgcaggagggaagtctgacatagaaggcatcttccctccaccttactttgagtggtttcaattcgaaaaggacttcacagtgtactttaacttggaagaatgcatctcatacttatgcgaatatattacagccaatggtccctttgatggcttccttggcttctcacagggtgcaactctttcagcacttttgataggttaccaggcacagggaaggttactaaaggagcattcaccaataaaatt

SEQ ID NO: 29797 - DNA, 375 bp, Glycine max
ggtgagttgagaggatcgtgagaggggcagtggccgagattccgtgagttgcaaaaatgaagacgattctttccaccgagaccatgaacatcccggacggcgtgagcatcaaagttcatgccaaggtcatcgaagttgagggcccccgcggaaaattggtgcgagacttcaagcatttgaatctcgattttcagctcattactgacgaaaacggtaaaagaaagctgaaaatcgacgcgtggtttggttctcggaaaacatccgccgccattcgcaccgccttgagccacgtggagaatcttatcaccggcgtcaccaagggctaccgctacaaaatgaggttcgtttatgcccattttcccatcaacgcaagca

SEQ ID NO: 29798 - DNA, 422 bp, Glycine max
ggtcttcaaaagaaggaaaaccaccgattatggcaacaatcgcagggtcccgttttcacattttcatcaatgctgaaagtaccagaacaagaccacatttaatcatcatcaggtccatccccgagcgattaattaatattacattttcgtggtttaacaacaaaaataatgtggaaagcaaatgagaacacaataataggaagagggatagtgatggactcagaatgagaagagaagagaattcgatcaatagttagtggacaaaatcactgtaacgtgatccttgtacgaccttcattaaatctgttagttgtgtcaaggagcatggaagataagatggattttttttttttttgggtttcctaggagagcaaacaaaaagacaaagcgtgactttgaattgtagggttgagtgttttttt

SEQ ID NO: 29799 - DNA, 405 bp, Glycine max
ggaggtagccattgatattctgctaatgactatggtgatcaaaaacacaaaccagttagaggaaagtatggattccacttatgacaggaaggctgaagtgaaagcctttgatgattcaaaagctggtgttaaaggtcttgtagagtctggattgacaaagatccctcgcatgttccattctggcaggttggatatcattgaaacctcagtcagtgactctaagttcggtatccccatcatagacctccaaaatatccactcctatcctgctctgcattcagaagtaattggcaaggttcgaagtgcatgccatgactggcgatttttccaggtgattaatcatggaattcctatcagcgtgtttgatgagatgattgatggaattcgtagatttcatgaacaaga

SEQ ID NO: 29800 - DNA, 290 bp, Glycine max
ggaagagtgaagagaatggcgtgccaaggtttaacctttctggctgtgttaatatgcgtttcagcactgtcactgagtccttctgttgcgggggaagggcaaaataatggccttgttatgaacttctacaaggaatcatgccctcaggctgaagacatcatcacagaacaagtcaagcttctctacaagcgccacaagaacactgctttctcctggctcaggaacatcttccatgactgtgctgttcagagttgtgatgcttcacttgtgctggactccacaagaaggag

SEQ ID NO: 29801 - DNA, 348 bp, Glycine max
  modified_base (257)..(257): a, c, g, t, unknown, or other
atctgaagaaagaggcatggccgaacaaaccttgatcatgatcaagccagatggcgttcaaagaggccttattggcgagattattagcagattgagaggaagggtttttacttgaaagggttgaaactcgttactgtggaccgtccttttgctgagaagcactatgctgatttgtctgcaaagcctttctttagtggtttggtggattacattgtctctggccctggtgttgccatgatctgggagggtaagaatgntgttacaactggccgaaagattatcggagccacaaacccagctcaatcttagccttggactattcgtggtgactttgctattgacattgga

SEQ ID NO: 29802 - DNA, 324 bp, Glycine max
gttggagaagagagcgagaagaacagcagccctaatgcaagctttgtcaaagttagcatggatggagcaccttaccttcgcaaagtggacttgaagatgtacaagagttaccgagagctctctgattctttaggcaaaatgttcagctccttcacctttggcaattgtgaatcccaaggaatgaaggatttcatgaatgagagcaagctgaatgatctcttgaacagctctgattatgtcccaacctatgaggacaaggatggtgactggatgcttgtcggtgatgtcccatgggagatgtttgttgaatcatgcaagcgttta

SEQ ID NO: 29803 - DNA, 440 bp, Glycine max
acctaggatggcatcaaatcaattctattggaggtgtttgtagcaggaagtgaaacaaccgcatcagcactagaatgggctatggcagagctcatgaaaaatccaatgaaattgaagaaagcccaggatgaggtgagaaaatttgtagggaataaatcaaaagtagaggaaaatgacatcaatcaaatggactacatgaaatgtgtaatcaaagaaactctaaggttacatccacctgctcctctcttggctcctagagagacagcatctagtgtgaaactgggagggtatgatattccagcaaaaacactggtatatgtcaatgcatgggcaattcaaagggaccctgagttttgggaaagacctgaaaagttcattccaaagagacatgataacagccgggttcattttaatggccaagacttgccatttattacatt

SEQ ID NO: 29804 - DNA, 273 bp, Glycine max
gggtggaggggacattgacaatgtagggctgtcacaataagctgacacttcaaagtgctatatcaagaccacatcttaagattatgagacccaaacacctgccatgcattaatgttatatattgatggagaaacaactatattgcatgtgatcagccaatgtgatcacaatattgatgctgagggaaggtgactgacatcagaatgctaagagaatagattttgtccatatgtagtgcacgaaaatagatctacatactggccagtataccta

SEQ ID NO: 29805 - DNA, 364 bp, Glycine max
ggttggaagaagagaaggagaatgacggaaaggtgcatccgatccgtcggggaagccattcactcctctcctttccaagccgttctccatctcgccggtggagcttctcaggtggtgggttcgttgctatcagttcccggtgcttcgaatactgtgctcgaagttgtggttccttactctaagatgtctctcattcagttactcggaaagattccatcccaattttgtggccaacagactgctgaagatatggctatattggcgtataatcgcgctcttaagctgtccaagccaggatccccggctgttggagtgggtttcactggttctttggccagcagtcggtcaaaacttcgggaacaca

SEQ ID NO: 29806 - DNA, 363 bp, Glycine max
ggatgaagaactatactatctatgctgtgtcaggcgaccattcgtattgtgtttggtttcttgtttattgcgttgatctggaagtttgattttgcacccttcatggttttgattattgccatactcaatgatggtaccattatgactatatccaaggatagagtgaaaccatcaccacttcctgatagctggaaactgagggagatatttgctactggcgttgtgctaggaagttacatggcactaatgacagtagtatttttctgggcaatgaaagataccaacttcttctcgaacaagtttggtgtgaggccattgagagatagccccgatgaaatgatggcagccttataccttcaagtc

SEQ ID NO: 29807 - DNA, 247 bp, Glycine max
  modified_base (34)..(34): a, c, g, t, unknown, or other
ggggagcggagtatttacagaactgggggggtancaaaaaaggtctgggcagaggttttcttctaccttgctgagaacaatgtcctttttgagggtattcttcttaagcctagcatggttacacctggagctgagtccaaggacaaggccagtcctcagacagttgctgattacaccctcaagctccttcacaggagaattccccctgctgtccctggaattatgtttttgtctggtggacagtctg

SEQ ID NO: 29808 - DNA, 382 bp, Glycine max
ggtctcactgacagttgaagtgttaaagaatgagattgctctggagcaggaatcagtggttttagctgaagatgctgtaaatggtctcgttcttgtggacatcataaatggcttttgcacagttggtgctggaaatctggctccaagagaatccaatacgcagatttcgggaatgatcagtgaatcagcagggctggctagagtgttctgtgagaagaatttgccggttatggctttcctggattctcaccatcctaacaagccagaggacccttatccccctcactgtattgttggctctgatgaatcaaaatctgtttcagcattaaaatggctagagaatgaacctaatgtaacaatcaggcgaaaggattgttttgat

SEQ ID NO: 29809 - DNA, 338 bp, Glycine max
ggaaaccgagaagaagaagatggagatgtatgagatctggagcaggagaatagcgttgggagcgttcgcgtttgttctgcttttcctatcggcctcggcagacgacgtcgttgtgctctctgaagataacttcgagaaggaagttggtcaggacagaggagctctcgttgagttctatgctccttggtgtggacactgcaaaaagcttgctccagaatatgaaaagcttggtagcagcttcaagaaagccaaatcttgtttaatcggcaaggttgactgtgatgagcacaagagtttgtgcagcaaatatggagtctctgggtacccaacaattcagt

SEQ ID NO: 29810 - DNA, 333 bp, Glycine max
gatccccaatcagagagaaaagggagggttcacaacttttccttttccttttgcttgcgaatctgaatcaaataatcaatcatccattcattattcatcatgtcgtcggcgaagaaaatcacgctgaagagttcggacggcgaggctttcgaggtggaggaggcggtggcgctggagtcgcagacgataaagcacatgatcgaggacgactgcgccgacagcggcatccctctgccgaacgtgacgagcaagatcctggcgaaggttatcgagtactgcaagaagcacgtcgaggccgcgaatcccgaagacaaaccctccgaggacgatctc

SEQ ID NO: 29811 - DNA, 352 bp, Glycine max
gaaacaaggtcaagggataaatttgggttccaggaagagaacaaatttgattctcttaacttgagcatgttgaacctggactctaaatttactgagaatgtgagcaaaagctcacttcgaaatggtgtttatggtatgaatgcagtgtatcagaaaaacaatgcaaacttggtgagtaatgtgatcagtaacaagtacaatggcagtattcagcataacaaagagatcaacaacaacactggcaacaacatcaacaccaatgaaagcaacaacacaaatgcaactgacaaaaggtttaagaccttgcctgctgcggagacactcccccgcaatgaggtgcttggaggataca

SEQ ID NO: 29812 - DNA, 391 bp, Glycine max
ggaacttcaaggatgagaatgtgctcttattgggttttctctttctattattctatataaggttgcttctcctcccttgatgactccaaattagcagagcacaaaaatattctgcaattttttttctttttgttttttaaggaaaagactaaccttctgactttccaaagaagagagtctagtaatacaccaatggatggaattttcgcttacatcattctcattttggttaccatattttcatttatgttcttaccaaaaccaaacagaagaagacctcagaaccagacacttgcaaagctccctccaggctcaatggggtggccgtacataagagaaacccttcaactctacttccaagacccaaatgcctacttttccaccaaacaca

SEQ ID NO: 29813 - DNA, 174 bp, Glycine max
gattacagaggtgtttggaagactcttagaatgggggaccactttagatgctggactactgcatcggaataacttgctaaatactattgaggctcaatatgagcaatgggatgtttaggtgaggaaggagaaatctattcatgataccactaacatgctgagtcttgatgtgac

SEQ ID NO: 29814 - DNA, 332 bp, Glycine max
gggtaatgagaataaagtaaatggtcttgaagcgtcttcagttaaatccatatctaaacagtctaatgtggtcagtaataccaaaggtgattcattgatgggtctggaaagccataaccaacagcttgccagttcctctgctgatgaacaggccaaagcagaagaagaatttaagaaatccttgtacggagctgctgctgatggaagcagtagtgatgaagaaggagtatccaaaatgaaaaaattacgcataaaaatacgagacaaaccaattgcctcttctactgtggatgtgaataagattaaggaagccactaggcaagttaaacttg

SEQ ID NO: 29815 - DNA, 326 bp, Glycine max
ggtgcaaaacgcgggtgtgtgtgactttcgttggagagagatgcagttccattcagaaactccaaacaaacatccctcgcgacaaccttaggaatctcgatcgccgaaaaaacctatgcagccccgaacacacacactctgcattccaacttgtttaaatcatgcctctcgattcacccttctctctcaataaatcttttggcctatgaaatcagattcttcgccaccgccacagtcataataaagttttatttttccaaataaagggaatggcgactcctgttgagcctcctaacgggatcagaactgaagggaagcattattat

SEQ ID NO: 29816 - DNA, 356 bp, Glycine max
ggaatcaattgttgatagtgcgtttgaaaatgttgagcaggtcatcttagaacactttgatcaagtagtgggagactgtttcatggattgcgtgaattgtctgatcaggtttgccaacaataaaacttcgcatcgtattagcttgaaggctattgcactcctgcggatctgtgaggaccgtcttgcagagggtcttattcctggaggtgctttaatgcctattgatgctactttggatgcaactttcgatgtaactgagcattattggttcccaatgctggctggtttatctgatctaacatcagatcaaaggccagaggtcagaagttgtgcacttgaagtcttgtttgatttac

SEQ ID NO: 29817 - DNA, 281 bp, Glycine max
ggaatcaattgttgataggggattttaaaatgatgagcgggtggatcttacaacactttgatcaagtagtgggagactgtttcatggattgcgtgaattgtctgatcaggtttgccaacaataaaacttctcatcgtattagcttgaaggctatagcactcctgccgatctgtgaggaccgtcttgcagagggtcttattcctggaggtgctttaatgcctattgatgctactttttattcaacttttgatttaactgagcatttattggttccaatgctt

SEQ ID NO: 29818 - DNA, 368 bp, Glycine max
ggacaaggtggggtggactcgatgaacaatatcgtttcccattaccagtattatcttgaccttctaggtgttggtcgagaacaggctgggccccatgaaatccttacatgcgctgagcaggttcctttcaacccatcttccaaacctgcttcttcatcttaagattatatttattagcatatgatattgttgtaccaatccctttgaaagtgaaagttaataagggttcttgaaattattggtatgcaataattttgaactgcgtggtagtgtgggaattcattatatagcttttgttcgttgttatctagaaggtttagtcatttgtaatatcatatgtcgtgaaaaattttgatctggaatatatg

SEQ ID NO: 29819 - DNA, 375 bp, Glycine max
gtccaacaaaacaaaaaaagggtccaatttttggaaaattattaccatcggttcgtattcatcaacgacccctcttctgtgcccacttccaaatcttctcctctcgctatgggttgcggctcctcccttccagataggggctcaaggcagttgggtcgacccaattcagagaatggtggagggcaggacgccaagaatctgagggtcaagcttgttctcttaggtgattctggtgttggtaaaagctgtattgttctacgatttgttcgtggtcagtttgatccaacatctaaggtaacttgtggagcttcttttttgtcgcaaacaataactctgcaagactctacaacagtcaagtttgaaatatgggatact

SEQ ID NO: 29820 - DNA, 337 bp, Glycine max
  modified_base (36)..(36): a, c, g, t, unknown, or other
gttgaaagtgagtgagagaaagagatcacatggcanaatggcttctactgaatgtttcttgcaccaccatgctcttaccacccctgccagatccccatcacaacgcatcatggttagcaccaagcctaaccagcttgtttgcaaggcacagaagcaagaggatattgatgtcagcccaatctctcgccggttagctctaaccgtgctcattggtgctgctgctgttggctccaaagtccaacctgctgatgcagcttatggggaagctgccaatgtgtttggaaagccaaaaacagacacaaatttcctgccatacaatggagatggattcaaacta

SEQ ID NO: 29821 - DNA, 336 bp, Glycine max
  modified_base (294)..(294): a, c, g, t, unknown, or other
ggcggaaagtgggtttaatggtttttttctagagagagagagaggcatgatggccaccaatcccatgaacatagctttggcctcttattcttattctcagtgttgagagagagagggtgtggtagtgattccagatgctttggaaatggggaaaaatgaacaacaacaacaacatgtgcaggaagaagggcaggttgaggctccaccctgttgttgggtccttcttcgaccattcagtttcaagtgtctgttccttctcctactcagtttgtcggctctgctttctgcactctnttgggttcttcctagacacaccatcacatatagttttgatgc

SEQ ID NO: 29822 - DNA, 372 bp, Glycine max
  modified_base (339)..(339): a, c, g, t, unknown, or other
gagacaaaaacagagaatatagaacagtgacaaagaggcaaaacctgagactgggaaaatcagagaaatgaacatgcagagcctaaggtgagtccagtcgccagcaagttgctgaagaaggaactgtaaattgaagagaaaaccgcaggaagatgcttggcttttagatatcccttttctgatttctcggatataacaaaaatgtcctttacaaaaagctctggaccaccatgttgatgttgtcatgacgcttgcagccaccatttgccatcacgaggaatcctcaactccaagtgtcccacacagtgatttactgggtggcgctgccctgctgccatngtggctgtttaacaaacactaattacatttttt

SEQ ID NO: 29823 - DNA, 187 bp, Glycine max
ggttgcagatgacaagataggtaaagtgagttggcgcactatgaagaacgcgatgatagcattcttggaccctgtaccctccattctatgctacctgtcataccaatctaccattagtactcattcttattgaacttctatgcggacgtagtgctatcaccaccctctgatattggacaatgtcctt

SEQ ID NO: 29824 - DNA, 372 bp, Glycine max
ggcgaagagaaatgaaattgcctctttcaagaagcatctgagtgtttactattttgtactatatttatatatagtcactcaagcttctaggatttctgcctgctgcatcaaaatgggaagcaacttgaggtttttgagtctttgcctcttggcattgattgcatcaactcatgctcaacttcagcttggtttttatgctaacagttgcccaaaagcagagcaaattgttttgaaatttgttcatgaccatatccacaatgctccatcactagcagctgcattaataagaatgcactttcatgactgttttgtaaggggatgtgatgcatcagtccttctgaactcaacaaccaatcaggctgagaagaatgc

SEQ ID NO: 29825 - DNA, 186 bp, Glycine max
  modified_base (33)..(33): a, c, g, t, unknown, or other
aaacccgggccgacgcacgcaaccgtacgtctncaaaaaaacaacataatggtgtcttaaacaaacaatctacctatttcacgtcggtatttttataaatgctggtgggccctaaaaatataaatattcacaacctcatttaatttcaatcccatctccattaattttttaaacacctacacctta

SEQ ID NO: 29826 - DNA, 409 bp, Glycine max
gttatagggggaggatttgttcttgtgatctgcaactcttgattctgagcgtgggtgcaaaaaagtcctttttttgggcttatgagagtgcggtcctttgcaggttttcagcagataagtagcttaacttccttgttgataagccttgaaggcttttgatgctgattttctgcacttgttgaacctttttcctttgttttgcatctgggtgttgttttggaactgtgtcactctgttggcatgtgagttttttatgtatgtggatttgagatattggtctaatggtctttctgaaatgatatttggtagaaagatttctgttaaaatgatggctatttttatttgaagatatatagtgtaatggatgagatcgaataaacttgtggatgattgagcataaatgggtttg

SEQ ID NO: 29827 - DNA, 178 bp, Glycine max
gaggaacgtgaaaggcatagcagcgttgatttcaccagggctgtggttttctttgtctgtattgaggttgtcattgggagcactcaacctaaccattcaagttgtgaaaccacatcgcaagaaaattcacaagcgatggatccgaagctgaaagaagtttctcagctcttcgatcgct

SEQ ID NO: 29828 - DNA, 271 bp, Glycine max
gacttattgaagatatctgtaaggacaatgatgctgttattcattttttggtcagaaaatcagatgccaaggtaaggactaaaccagttgacaaggattttgaattatcaattgaagcatcatatgtgcacaatctggtaccaaatttacatgcagaccagttagggtcagtctctgtaacaaatgaggtcctggagaggagccaattaacaagagattttgttctggaaccaattattatgaattccaacatcaaaattccacttgtgat

SEQ ID NO: 29829 - DNA, 385 bp, Glycine max
gggtgagagaaaaaatgttaaccttcctggtgttgtggtggatctacccacacttactgagaaggataaggaagacattcttggatggggtgtacccaacaagattgacatgattgctctttcatttgttcgtaaaggctcggatcttgttaatgtccgcaaggttctggggccacatgcaaagaatattcagttgatgtcaaaggttgagaatcaggagggagtcctgaattttgacgaaatcctgcgggagactgatgcattcatggtggcacgtggtgatcttggaatggagatcccagtagaaaagattttcctggcacagaagatgatgatatacaagtgtaatctttgtgggaagccagtggtgactgctacccaaatg

SEQ ID NO: 29830 - DNA, 168 bp, Glycine max
gaagctgactgagaaagtctgagacttttagagcaactgggtggtctgggcgcaaaccactctttagttggggagatagtctgtattctgcaccttgcaagatgtctcacgcagttatcaacgaatatgaagtgcacattgttattggcgcaccgctctgtgatctta

SEQ ID NO: 29831 - DNA, 244 bp, Glycine max
  modified_base (32)..(32): a, c, g, t, unknown, or other
ggagtggtggcatcaaaatcaaagggtgtctntcagaaacgaagaaaatgggaagaatcttcacggtggagcttgagggtaggtcttacagttgcaagtcctgcaaaacccacctagcccttgcagatgatctcatctctcgttcattttattgccagcggggaaaagcatatctcttcaataatgttgtgaacttcacaattggagagctagaggaaaggttgatgctttcgggactgcatac

SEQ ID NO: 29832 - DNA, 338 bp, Glycine max
ggttaaagaaagggaatagaagcgaaaagaaaggaccaattaatgaagagggtggaatcggatcgaatacaaacttgacgtccgcaatgaccctctctctcaatactttctctctctaaaacgcacggcatgaagcagcagcagcagcagcagcagcaacagcaacagtacgttgtttcactgagattaaagacgatgctgcttctgcactgagaaaaccctagacacttatagtggacgcgaattcagaaaccccaagtggaaagtccgagccttttcgttccttctcagttccttgatcagttcccagattctgttactgttcaatttcacaattt

SEQ ID NO: 29833 - DNA, 364 bp, Glycine max
ggagaaagaaagggaatagaagcgaaaagaaaggaccaaagaatgaagaagattcaatcggatcgaatacaaacttgacgtccgcaatgaccctctctctcaatactttctctctctaaaacgcacggcatgaagcagcagcagcagcagcagcagcaacagcaacagtacgttgtttcactgagattaaagacgatgctgcttctgcactgagaaaaccctagacacttatagtggacgcgaattcagaaaccccaagtggaaagtccgagccttttcgttccttctcagttccttgatcagttcccagattctgttactgttcaatttcacaattttcaactctcggtgattgcttgaagac

SEQ ID NO: 29834 - DNA, 242 bp, Glycine max
gttacaaccaggggtaatggtgtgtgactggatggtgatgtaactgggccagtgcatattaacgtacacaagttatgccagcatctgctctatccagatgcagactctctgccaactgaactcgcggttcattgagctgctgaaaatacgaaagcagacgttgacaattcccgaagtacatatactagagcatacatcaatctcaaatcacatatacctgttggcatgcaaatgatgcctac

SEQ ID NO: 29835 - DNA, 387 bp, Glycine max
gattgcgaagacaaacacgattatgcctatcattggcaaactgtactgttcatcgtctgagacggtgcttgtggtgaggaggaggccacacgtggtgaatggtgggggttttgtagtcatggattgtagtgcccagagggttgtgttcagggtcgatggttgtggtgttcgtggcaaaaagggagacttgattctaagagaaggagatggagacgctttgcttctcatgcgtcgaatgggaggcatggttgaggccttaagcatttacaagaagtggaaatgctacagcttggactacgaaggatctcggaagctggttttcagcttgagagaacccaattcttgtttggttaagaacaatgcaatcagaatcttcactaggaacag

SEQ ID NO: 29836 - DNA, 394 bp, Glycine max
gggatatttgttgatgtgcgcgataaggcgaggctgagcagagagtggtaaagtaaaatggcttacaatctttgctcttccccttcctctctcttccatgaccttccctccatttcttcttcttcttcttcccgcaaattcaaacttcgaaacttgtcctcttcttctctcactcctcattccaaaacccttctccatgtctccttgcacgaacacgaacccattcccgaacacctaccacccgacgcaaaatcctcgtcttcgtcgaaaagtaattacatctgggtcaacccccgaagccccatggccaaacaactcgagagtagatcctacgatgccaggtacacttctcttgtaaatctcgcccactccttggactcttgcaatccctctc

SEQ ID NO: 29837 - DNA, 404 bp, Glycine max
gggcaaaggtgttttgaagaattttacaagatctgcgggggatgttgcagagacaaagatagcagctgattggaaaggtggagaaaattgcccaaagggtacacgtcctgaggaaattgatgcatctggggatgtaaacatggaggcatcaataacacctgatgatgttattcgggctggaggatttggtgccagggatgatatcagtagctttcttcctgttgcaagtgattctaccgacttcgaagcttcaatccgagatgcacgagattatgaagaaccacagggtcaagtaagcaggcccggccttggttggactggtgctactaagggggaatgaatgttgttgctgttatgtgctccagtattagcaactttttgttttagctgggaagaccatgtgt

SEQ ID NO: 29838 - DNA, 354 bp, Glycine max
gacggcgaaaagctaaatatcatcaaagtactcaaattatcatggctgtcatggttgcattcttgaatttgatcatcatcttttcagtagtctctacaacaggcaagtcactgagcttaaactactatgcaaaaacatgccctaatgtggagttcattgttgccaaggcagtaaaagatgccactgctatggacataactgttccaacaaccattctgcgaatgcacttccatgattgtttcgttcggaggtgtgatgcctctgtgctgctaaattcaaaaggaaacaacaaagcataaaaagacgggccaccaaatgtttctttgcatgcattctatgtcattgatgcagcaa

SEQ ID NO: 29839 - DNA, 375 bp, Glycine max
ggagcaagagtgaagagcgaagagaatggctcccaagggtttaatctttttggctgcgttatgcttctcagcactgtcactgagtcgttgtcttgcggaggataatggacttgttatgaacttctacaaggaatcatgccctcaggctgaagacatcatcaaagaacaagtcaagcttctctacaagcgccacaagaacactgctttctcctggctcagaaacatcttccatgactgtgctgttcagagttgtgatgcttcactgttgctggactccacaagaaggagcttgtctgagaaagaaacagatagaagctttgggttgagaaatttcaagtacattgagaccatcaaagaagctttggaaagggaatg

SEQ ID NO: 29840 - DNA, 372 bp, Glycine max
aattcgagcgggcgcttttgttatatgactactgattgtttttttgcctacaaatgcgctcatatcactctaatattctggactccaattccattcttgctctatttgcaactgtgaatggcatcaatcctcttaacatttaaagtattacattaaatctctccttactttttgtgccattattaagcacattatccctcagtgacctttacgcgaaacatatggacttatctgactgcagcttcctaatggatgcatttctcctaactgtgtatggcccagcaaacaagggatccaattcgtgttcaatcaatactttgataaaatcatgtcaggaatagtttctacctcttggcttccatacacatcaat

SEQ ID NO: 29841 - DNA, 253 bp, Glycine max
cgaccgaggcggaagctagaggctgatgacgctagcaccctcgtgaataccctaattccgagggtttcagtcttcgacctgtcacttgagctgcaacatcttcagccataaggctgctagccagactgcaatcacacacaatgactgacggctacgaatgagacaggaaccctgagatactgcagatcatgaacacggtctaggcgttggacgccgatctaggtcatgagaccagcatgaactcactgatgat

SEQ ID NO: 29842 - DNA, 393 bp, Glycine max
gacggacgagggtttcgtttcgggtttgacgttgttcacaatcactttctgcgcttcactcactcccttcgtgcggttttctttctttgtcgaactcgtgcgaaaatgcgtgagattcttcacatacagggagggcaatgcggaaaccagatcggagcgaagttctgggaggtggtgtgcgcggagcacgggatcgattccacggggaggtaccagggggacaacgagttgcaactcgagcgagtcaacgtctattacaatgaagcgagttgcggaaggttcgtgccgagggcggtgctcatggatctagagccagggaccatggacagcgtcagatctggtccctacggtcagattttccgacctgataacttcgtcttcggccagtccggc

SEQ ID NO: 29843 - DNA, 389 bp, Glycine max
ggaggcggagacgaagaagtgaagagaagagaagagaagggatttggatctgaaaagagaagatggggggaggaatggaagcaaacaagaacaagttcatagaggattggggcactgccagagagaatctggagttcaatttccgttggactcgccgcaaccttgctcttgttggcatcttcggcatcgctattcccgtcctcgtctacaagggcatcgtccgtgaattccatatgcaagatgaagataatggtcggccgtacaggaagttcatgtgagagagtatggagagtcttttgtaataattcgtcaagttagaccttgatattatgaggctacaaaccatgttttttttccttaattcgcaaaggcttgcttgcttttaagta

SEQ ID NO: 29844 - DNA, 386 bp, Glycine max
gggaaagaaatggagcgtaatcgggacttctctgaagcatcgattacattggataggtctcaagcattgatgatcccagtgatgagctcttttagcttgcttttgatgttctacttgttctcatctgtctcacagcttctcactgcattcactgctgttgcttctgcgtgctgccttttcttctgcttgtatccttatgctgcctatttgaaggcacagtttggtttagctgatccatttgtttcacgctgttgttcaaaatctttcacacgtatccaagcaatactattgttagtgtgctctttcaaggtggctgcttggcttgctactggtcattggatactgaacaatttgttaggcatatctatatgcgttgcggttgtaag

SEQ ID NO: 29845 - DNA, 376 bp, Glycine max
ggagcaagagtgaagagcgaagagaatggctgccaagggtttaatctttttggctgtgttatgcttctcagcactgtcactgagtcgttgtcttgcggaggataatggacttgttatgaacttctacaaggaatcacgccctcaggctgaagacatcatcaaagaacaagtcaagcttctctacaagcgccacaagaacactgctttctcctggctcagaaacatcttccatgactgtgctgttcagagttgtgatgcttcactgttgctggactccacaagaaggagcttgtctgagaaggaaacagatagaagctttgggttgagaaatttcaggtgcattgagaccatcaaagaagctttggaaagggaatgc

SEQ ID NO: 29846 - DNA, 381 bp, Glycine max
gaacaacacgtagtattatttcggtgatttggccctcttcgctctctctcagtgaccagagacagatgatgatggagatggcgaagcgaaacgctgtcgttgcggcactcgcggcgttggtgctactcgcggcgagtgtggcggtggatgctcaggagaactcggacgtgaagacgctggtgaagtacaagcacgggaagaagtactgcgacaaaggatgggaatgtaagggctggtcaatttactgttgtaacctcaccattaccgattatttccagacctaccagttcgagaatctgttctccaagcggaactcgccggtggcgcacgcggtcggattttgggactaccactccttcattggcggccgccggctttttg

SEQ ID NO: 29847 - DNA, 393 bp, Glycine max
gggacaattccaaatgaaatctgcaatatctcccgattgcaggacttgctgttggatcagaatttcattacaggagagatccctcatgaaattggaaattgtgcaaaacttcttgaattacaattgggcagtaatattttgactggaactattcctcctgagattggtcgcattaggaacttgcagatagctttaaatttgagcttcaatcatcttcatggatcactgccccctgaattaggaaagctggacaaacttgtttctctggatgtttcaaacaatcggctatcgggtaatatcccacctgagcttaatggaatgttgagcttgatagaggtgaacttctcaaataatctggtcggaggttctgtgccaacatttgtaccattttag

SEQ ID NO: 29848 - DNA, 213 bp, Glycine max
ggttctagtgtgtgattgtttgttgttgtaactctttcttcttcttttgctggtctgtgtttgtgtttgtttcttctctcacctgaaaatgtcttgctgtggtggtaactgtggcttcggaagctcctgcatgtgccgcaactggtgtagatgcttgaagatgtacccactcttgttcttcactgttttaaccaccaccgagaccttcgtcat

SEQ ID NO: 29849 - DNA, 385 bp, Glycine max
ggtgggtgtggatggaggtgatggttggggtataagatctgcgactgaaagtagagaatagaatctggatgtgaataggtacagttgcacaggacaacgtactagggaggtaccattactcagactaagcgctgtcagactatcacctgcttggggatgagctcaatcatgtgtacatgggcattctacacagtgctgcatgatgggtcagatgcattgagcatgactcatccttggaaaggtgaccatcttgactattgctgggctcattatcattgctcatgcatgagcttgaagaacatgaagtacagaatttgaaatatctgacgttgatgaagaccatttcaaatgcttactatgagcaatgtactaaatttgtctgcta

SEQ ID NO: 29850 - DNA, 405 bp, Glycine max
actacaaaatggggtaccaataaatgccaaaccacagcttaaaagggtcgacacagctacttacaaaaggccttcacttgattttctacaggatacgagtgattaagtcattttttgtgttgcttctgctattcagaggatgcaatggaagttttcttctaccaatgtgtgccactttacaagcatgcattagatggcaattggcaagcaacaaagcacatcttagatgcaaaccctgcactgaagactgctgccatagcacctgggtggcccacagtgctgcatgttgctgcaagcacaaaccattatcactttgtggaggagttgctcaacatattagacaatgatgcaattcaattgcaggataaaaagggcaacactgccttttgctttgatgctggggct

SEQ ID NO: 29851 - DNA, 368 bp, Glycine max
gcccagaacagagtgtgataatagtaagacagagcacctactcactcgtaaatggcgaggaagaagatcagagagtaccactccaagaggcttctcaaggagcatctcaaacgtctcgcctctatcgacctccaaatcctctcagctcaggtgacagaatctacggatttcactgagctgacagaccagcatccatggctttcgtcaaccagattggtcgtcaagccagacatgctgttcgggaagcgcggcaagagtggcttagttgctctcaatttagacatagctcaagtcgccgagttcgtcaaagcacgcctcggcgttgaaggtgagatgggaagttgcaaggcgcctataaccacttttat

SEQ ID NO: 29852 - DNA, 394 bp, Glycine max
  modified_base (363)..(363): a, c, g, t, unknown, or other
gatcgaagcaaaaaatgaaaacccagagtgcttctctcctctgtctttttctctctcttgctatccttttggctagtggtactgctgcaagtgcaactccaagaagcgcagtgccaagccaccatgtttcaacattcaacagaagcctttttccttccacttttctctttggaattggttcttctgcttaccaggcagaaggagcagcaagtgtagatgggagaggaccaggcatatgggacacctacactagacagcatactgaaaagatttgggatcatagcaccggtgacatgggagctgatttttatcatcgatacaagggtgacataaaaatagcgaaagaaattgggctggactctntcagattctctatctcatggtcaagaatatt

SEQ ID NO: 29853 - DNA, 399 bp, Glycine max
  modified_base (387)..(387): a, c, g, t, unknown, or other
gacaggataaagcactgacgaagcggcactgtgaccatgtccctattttttcatgcttgttagagagacaggtaaagttgctgaaaggagctgctttttctcgtgtatctgctagagctgttataggcacttgagcaatttggaaatgtcgaatttattgcggcattctttgagcaaattcactttcagtccaaacggaacaccaactgggagagaaaaagtaacaccaaaacataagcatctgagaccatttcaatgtgtgctgacacaggataacagaagcattgccgtcaagaatggcaatgattcattggtcatatgtcgggttgtgaatgggatgtggcagacgagtggtgggtggggcagaattgatagggatgatgctgntgatgctatgct

SEQ ID NO: 29854 - DNA, 413 bp, Glycine max
gatttatgggtcttttgataagccctctgagaagaggaaggggtacttgcttcccaggcccaagatggttaactctgatcttgccaggattattaattctgacgaggttcagtctgttgtgaggcccattaagaaggatgtgaagaaggccacgctgaagaagaaccctcttaagaacctgaactctatgctgaagctgaatccttatgccaagactgctaagaggatggctcttcttgctgaagctcagcgcgttaaggccaagaaagagaagctcgacaagaagaggaagactgtctctaaagaagaagcttctgccatcaagtctgctgggaaagcatggtatcacactatggtgtcagattctgattatacagaattcgacaacttttctaagtggctgggtgtttcac

SEQ ID NO: 29855 - DNA, 218 bp, Glycine max
ggatccaaacaacaaatattcatggctttctttagtctctccgtcctcttccttcttcttgtttcatctgccactgcttgtgatcgctgcttgtatcaatccaaggcttcctatttctccaaagcttctgctctttcatctggcgcatgtgggtatggctctttggcactagacataagtggtgtacaccttgcaccccgtgtgtattctctctttaa

SEQ ID NO: 29856 - DNA, 347 bp, Glycine max
tttttcactctttcatacttcttttatattacgactattggggacacattttattccctttaccaaaataactattaacatttaattaaaatcaacatccatcattttcttctattctacaattttattatcatcacaattccattcattaccatattattcctctccaaattaacactatctattctcccctactcataaataaatcccaattaatctttctattaacacaacacattttttctttaaaacattccttaaatttcttttatacaacaaaatattacatacattgctaacattatatatcatactccaaaactattaaccaacaatttttactttta

SEQ ID NO: 29857 - DNA, 407 bp, Glycine max
gtgaaaaggaagtgatgcgtaactatgagggggatactgatgctgaagtgttggacttgcttgacaccgcttctaggcagaaacaggggaatgtggtggcaaagctatactggggggatgcaagagagaaaattgtggaaaccgttggggatatgaagcttgactctctggtcatgggtagcataggcttggatgccatacaaagggtattactggggagtgtgactaattatgtcaccgtatatgccaattgccctataacgattgtgaaagactctgacccttctactatctgataagctactgaatatgggtggcctttgcaatcgggagtggatatcttcatcagtgaccagagtgtgtttgccttcgttcttactatttacacatggctaattgggattatg

SEQ ID NO: 29858 - DNA, 404 bp, Glycine max
gtgaaaaggaggtgatgcgtcactatgagggggatactgatgctgaggtgttggacttgcttgacaccgcttctaggcagaaacaggtgaatgtggtggcaaagctatactgtggggatgcaagagagaaaattgcggaagccgttggggatttgaagcttgactctttggtcatgggtagcataggcttgggtgccatacaaagggtattactggggagtgtgactaattatgtcaccgcatatgcgagttgccctattacgatggtgaaagactctgccccttctactatctgataagctactgaatttggttggcctttgcaatcggctgttttatcttcatcagtgaccagagtgtgttttcctccgttcttacttcttacacatgtctaattgggatta

SEQ ID NO: 29859 - DNA, 394 bp, Glycine max
gcactaataatgatataattctttgtgatggtgtttgtgatcgtggatttcaccagctctgtttggatcctccgttgttaactgaagacattccacctggcgatgagggttggttatgcccaggatgtgattgcaaagatgactgcatggaccttgttaacgactcctttggaacaagtctttctattagtgacacctgggagagagtctttcctgaagcagcatcatttgctggaaataatatggataacaacttgggacttccttctgatgattctgatgatgatgattataatcctaatggttcagatgatgtgaaaattgaaggggatgagtcaagttctgatgaatccgagtatgcttctggttctgagaaattggaaggtggttcaca

SEQ ID NO: 29860 - DNA, 402 bp, Glycine max
ggagagtgtagggggaagacgtgtgggagcgggagaagagaaatgaacaagactgaaaagtggattgagggagacgagagtggcgcggagatgctgagtagagtgagcagcgtgcgacctttcctgattcctccgccgatccacagggttcctcttcgcgtcggaaacgtcctcgagcttgtggggccctatccctacgccaaaacgcacattctcatacacgccgtcatcacttccgttctccccaaacgccactgaggcctcgaccacttggtcctctttctcgaccttgattcccgcttcgatgtcacgcgcttctgccaattgctcattcaccgcattaccctacacggaacggattcttatgataaaaccctatatgatctctgcatggcccgtttt

SEQ ID NO: 29861 - DNA, 417 bp, Glycine max
ggatgcaggtcatttgataggaaacttgtggaggaaggaatggggaggactattctcaccttgcctcttgaggatcaacaaagcattttgctttcatggttggggagtttcttgaaaactggtgatagctgtcccaatcttcaaagggcatttgaggtgtggtggaggagaaccttcattaggccatatgtggagaaccaaggtaatgttgctgtgtcagatagtagttcaatgttgccaaagcagcgtgagtgaataaagggttcatgaatatgtttcattggttgaggagatggagctatatattaacaaggacgaggaagacgaaagatatgtgttgaattgcacaatgtgggattatctccaacagctaacaagtactgagaagtgtcatgtgatttgcatggcttttactct

SEQ ID NO: 29862 - DNA, 407 bp, Glycine max
ggactatagtcagactatcaattccgctaactgcaacccatcttcagaggccgatctttctatagcgactctacgcatgaaccttaagctcattgttgtacatactagactatggctatgatcttacatttacgggctctcttggcttcttttactattcctgtgctgatcaatgcgactactgggcatcctctaatcactgcaactatcacatctacgaactcacttgcagatactcgcattcataaccaccaattgactatgggctagacaaactcctctcgatatacaacggactgctagaataagcttcgacctagaaggctctgcaacctataactctcgacatacttgattgctaatatgcttggaatgacctatgatcaaccaatctacctcaacttaaa

SEQ ID NO: 29863 - DNA, 277 bp, Glycine max
ggctcaagtgagtttgttgatcgagataactagagacagtgtgatgaaaatgaagggccttgttttcttcgttgctacaattttggtagcatgtcaatgccatgcgtacgatatgttccctctccgaatgaacactggctatggtgcccgtactccgtaggtgaaatgcccaagttggaggcttgctgtggaagcacacaacatcttttgcttttagaccattccttattattgcgttgactcttcccaagtattcattcattgcgaacaattttta

SEQ ID NO: 29864 - DNA, 300 bp, Glycine max
accgtttcaacaacactacataaggggacttttattgtttcagaactcaaaacaaatgaagcttctatgttaacactatatgaaatacacacacaaccttcactttacatcatcttctatccaattccaaaataacccatcaaatcaaacttgaatttatatacaccctctacccttgtctatcccacgctaaataccaacttcgatgtttattcatccacaatatctaatcattcttttccatccaatttatcctacttcatctcattctttcatcaccgaattatctaccctaatcta

SEQ ID NO: 29865 - DNA, 406 bp, Glycine max
gggaacaggggcctgttgaatttgtaagactgaaaacctgcgtcaaacctactgagtaattactaagttttcattggatggttcatctgctcccaaaaagcatatgtatgtgcttggtgagaaagaagtccttttaggttatagggaaagggatagtgtcaggttcctctctattgccaagaagtcaaaaagacaaaattccaccagaaggtatatcctgaagatatgatcaatcagtccaatgggcacctgaaagccaggtaaatagccgggataacttccttcactctctggtagcgagaaagcttctggtaatcagaaggttgaaagtgaatcggtggtggtgatctagtcttcaaaagataatctcggaaaactagacaatactttacttaccagccttact

SEQ ID NO: 29866 - DNA, 389 bp, Glycine max
ggatgatgaggaaacattggtagaagaaattgaagagagagagagagagagagagagagagagagggttggattggttttcttcttccttttctctaaagagaatctaatctcaatcctcattacagatttcttcattcctctctcagtcttttctgttttccccctttgacatcctcgttttcgccgaaacaaaaacaactaagattttttgtttgttttgtgtttcttctacttgttgttatttgactcggttgtctgaataggttgttgcagcagggtcgggagccacagctatgcagagccaaattgtgtgcaatggttgtaaggaccttctgctttacccaaagagggcaaccaatgtttgttgtgcattgtgcaacacaatta

SEQ ID NO: 29867 - DNA, 392 bp, Glycine max
gatcaaaccaagacatagcatacgatccaaactcttttttcatttgcagcatcaaaatgagtggtagcaacgatggtagcggcagctggagctctaggtttttgaaggtggctagtgcagctgccgctacagccggcgttgccggcggtttatatgccattctttcatcctcaacctctgctagctctgagatggaagtgccgtttggcagcgcacggcgtgagagcaaagaacgtgacgatggtggctccgggtctcatcctcgcgagggtgccaccacggtcagtcgttggaagaaacctgagattggttgggggaagcttaacgtggatggttcacgcgacccatacaaaagttcctccgctggttgggggggtggtctgagggacgca

SEQ ID NO: 29868 - DNA, 400 bp, Glycine max
ggaaagagaggggatagatagatagatagatataagagagagagacaatctcacacaacgcatatatacagagagagaaacaaaagacgacttgttggggtctatagtgattttgttcttacttatcagattctcatttgttcttttcaatcatcatttcatacaagagatctctcttctcctcaactccttctgtctaaaagactcaatctttaatctgaacgctgcgtttttcattccgggctcccctttttttgttgtcccaaaatataataaaaaaatttcattttttctttcattgcacaaatggcacccagttttgattgtgtttcgagccttctctgtgtggaagacaacaatatttttgacgaaaacgattatggtggttcggtggaggtgt

SEQ ID NO: 29869 - DNA, 400 bp, Glycine max
ggagtggaagaaggatatagtcatagagtcggagaagaggcggcgagtgttgggttgagaatcctatcttgttcgtgtttctcgtcttctttattttcttttgattttcttgtggatgcgaaacagaatctatgacgagtcaatcggagaagaacctattggctttgttggggctgggtttagctggaatagttctaatcaccagaaagctcaagaagtctgtcagaaaggatttgggggctttcattgagaagcttcagctgcttcctactccccagcctgctcctgccaaggctccccatcccctcaccgcactcaccttcgcactttccgacctatttgacatcgaaggacacgtgtcgactttcgggcatccggagtgggctcggactcacgaacc

SEQ ID NO: 29870 - DNA, 401 bp, Glycine max
gagaacaaacctgtcactaacagtagggatacacaagaggtaatgttggagcctggcctgaaattaatcaaaattttcaaggaatataccatcaagacatgcattctggatgattttggcttctatgaggcccgtcagaagactattttggagaagaaagcaaagcaacaattcccaaagcaggtatgggaagggaaacctgctgatgagaagattgagataaatggggaagtcaatactcaaaaatctgaagttagctcggaagtgctcaaggagtcccttgctgataaggatagtgatgaccacaaagttcccgagaatggatgtgctacaaaaactggagatgccccaaagggtgctaaaccagttggtcctgagagcaagattgtagccaatggggt

SEQ ID NO: 29871 - DNA, 310 bp, Glycine max
cgacagcaagcgtgtgactaacaatgggcaggcggaacaggaaatgcaggatgctgtgctgaacctaatcttatcttcagaaggaatataccaagctcacaagcatactggatcagatcgccttacatgagacaagccagaagactatgatacagaataaggccaagcaacagttactatagcacgtacgggaaggaccacctgctgatgagaacattaagataaatgggcaagtcgatgactgatacatgttaattagatccgaagtgctcaagagagctcctagctgagaaggatcgtcatcaccaca

SEQ ID NO: 29872 - DNA, 115 bp, Glycine max
ggatgaatagataggtactgttgggtcgtaatttgcattttgctgtgctgtgcgggtttcctcttcagattcatggcggcaacccaaccaacgcaaggtccggatcgtaccaccg

SEQ ID NO: 29873 - DNA, 395 bp, Glycine max
ggatgactttgagaatattacaaactggcatgtacccattttagccatgaccgcagatgtgatacaggctacacacgaggaatgcctaaggtgtggcatggatggatatgtttcaaaaccatttgaagctgaacagctgtatagagaagtctcacggtttttccagtcatcttgaaaagaaaatacggtgccgagttaaaccagaatatttgataatggaagcgtagctgtccgtaatccaggacactcccaagtgggcaaataggttccgaagtctcctgagaggagtgtacataagagccaagtttgattggttgcaattgagttgtaattggttgttaagggtaccaaaacccattaattcttcttccatgtaaagtcagccgaaatgattg

SEQ ID NO: 29874 - DNA, 418 bp, Glycine max
gactgaaaaaaagtgagaaacacgaacctcaaacgtcagacagaaccaagaacacacttcttctcttcttccattctctaacgctatcagcatcaacacagtgtcacatccattaacgtgctatggtgtttagttaggaaacaccggtggtaaaattgtacgaagcagaaagaacatggctccgtctagcaaggctgagaaaaaggctgccgtggatgcagctgcatggatgttcaatgttgttacatctgttggaatcatcattgtaaacaaagctttgatggcctcttatggcttcagttttgccacaacattaacaggcatgcactttgctaccacaactttgatgacagttgtactaaggatgctgggatatgtccagccttctcatttacccttgccagatcttctaaaattt

SEQ ID NO: 29875 - DNA, 399 bp, Glycine max
ggagagagaacatataacaggtgtggacttttgggttactggtagacgttaaatttgtgagagaatagagatatttatttttctagatatccaatttctttagtacatgaaagagtgctgacaaaatggacacctctattttataaatatttcatcaatatttatctttttctcttttcctatagtgtcataatactatatgtaatgatatttgaacatcaatttattttaaatatttcattaattatttctttttattttttttctttttatcacatcataagcgcatgatcataataaggtgttttttttttttttttaaaaaaagctaaaaattcttcttatatattatacctggtaattaggttaatacttaacacatatttgtgataactcatg

SEQ ID NO: 29876 - DNA, 315 bp, Glycine max
ggagagagctgttttagttagaaaaaaacgaaccgggttttctttctttgtttctctctctatctatctctatttctcacataaaccgcctacttgcatgcggttcataaatcagcaaagccttgaaaagttgctgtgtgtgttcgaagaagacaacttttcctttattatttatttttctcactgagcttcagttaaagtagctagctagctagagggaattctgctgttttccatggctaaagcatgaaagtttttgatttgatctcaatcaagctcctgatatatactagagagagagagagatgctgtgtt

SEQ ID NO: 29877 - DNA, 402 bp, Glycine max
gcaactgcaattatttatagcggagaacacaagcatcaatgtcctcatcctaacaagtgctcaaaagacaccatgacttcaaatgaaaattcaaatatgcaagggaatgtatgattcaacgtatcaagggacgagtacaaactcaatgtctaagatggatcccgagtcaagtcaggcaacagctgatcgtctatcaagaacacgtgacagcgaggaagtagctgatcatgaaactgaagtggatgagacaaatgttgagcctgagcccaagaggagaaaagcacaagtctcgcagtcagatccaccttcttcacataggacttgtaccgagcctcgaatcattgtgcacacaacaagtgaagttgatctcttagatgatgggtatagatggcgaaaatatgg

SEQ ID NO: 29878 - DNA, 240 bp, Glycine max
gacactaaacaagttaaaagaagagcatcactgaactaacaaagcaaccctatgtcgaaggtggtttgtgtcaccggagccagcggcgccatcggatcatgggtggtcctactcctactgcagcgtggttacaccgtacatgccaccgtccaagatatcaagggatgaaaattgagacgaaaacatttggaaggaaatggaagaagcaaagagtcatctccatttttttgaaatggatct

SEQ ID NO: 29879 - DNA, 378 bp, Glycine max
ggagcaagagtgaagagcgaagagaatggctcccaagggtttaatctttttggctgtgttatgcttctcagcactgtcactgagtcgttgtcttgcggaggataatggacttgttatgaacttctacaaggaatcatgccctcaggctgaagacatcatcaaagaacaagtcaagcttctctacaagcgccacaagaacactgctttctcctggctcagaaacatcttccatgactgtgcttttcagagttgtgatgcttcactgttgctggacttcacaagaaggagcttgtctgagaaggaaacagatagaagctttgggttgagaaatttcaggtacattgagaccatcaaagaagctttggaaagggaatgccc

SEQ ID NO: 29880 - DNA, 403 bp, Glycine max
  modified_base (285)..(285): a, c, g, t, unknown, or other
gacggcaacagaagaataatcaaatttctcagatctatccgacgtcgtcgcagatccaccaaccgttatggctgccttcagcggtgatgaaacggttccgtttttcggcttccttggagccgcagctgccctcgtcttctcctgtatgggagctgcctatggtacagcaaagagtggtgtgggcgtggctttcatgggtgtgatgagacctgagctggtgatgaagtctattgtccctgttgtcatggctggagttttgggtatttatggccttattattgctgntattatcagtaccggtattaatccaaaggccaaatcttattacctctttgatggttatgcacatatctcctctggtcttgcctgtggcttggctggcctttctgctggcatggctatt

SEQ ID NO: 29881 - DNA, 377 bp, Glycine max
aggcagaagaagaagaagaagaagaaaacgggaaaaacgcacgacaaacagaggaagatcgatcgagagcgtgactaagcgggtctgagttgaagaaatcaagaagcagaactagagcaactcaacggcctgataatagccaggctatggcagcacttacaaatggtgggcttccggacttgaatgggaagaagaacaaataggctgctagtggcttcaattgttcctgggggcagggcagacttgttagatatttaaaatattgacaatgctaaaagcaaaaggacagaagggaatgaatcggcgaacacgaaagacgcatatcatgaccatacccaagtagctttaggcctggcggaagacctgctcggaaagag

SEQ ID NO: 29882 - DNA, 357 bp, Glycine max
aggcgtccttacacctcaaaaaagacgttcgaaagtttgagtgaatatttcattaaagggtcttctgtaatatataaatgatcatattctacttttgtatccataaaagacttttaccatcatactgaacacaaacttctatcgattgctgataagaatgatgaaaattcatttcaggaatcaacatctcggggaggataaagcctgtattgaaaacaacattaagttggttacttttgttgaatctaatgattctgcatttaatctttatattccttttgttatctcaactactttcttcaataataatatttacaatagtcaacttttcagatgaaataaatgcttccccattca

SEQ ID NO: 29883 - DNA, 407 bp, Glycine max
gaaggtaagggggtgtggtcggtcatagactgcagaaaacctattaaaatttcatttggaaaagaatctgccaattttgcggtgtgatatttaggttggagagaagaaaagatgccgttgaaggtgttagaggcgacagtgtcgagtttcgatgtggtttttgagaagttccgatcagaggctccacaaaacaaggccaatctcatcctcttcttggcggacaatgacccggctacctctctcagctggtgccctgattgtgtgagagcagaacctgtgatatacaagaagctggaggcttcacctgatgacattgcactattgagagcttatgttggagatagaccaacatggaggaatccccaacatccatggaaggtggatcctaagttcaagctcactggggt

SEQ ID NO: 29884 - DNA, 393 bp, Glycine max
ggagagagagagagaaacaaagcagcacccatttggatcctctcttctcttctttgatctccgttaccctttttgttttctcaacagagagagagagagagaatctttcgaagttcgtttgcgtgtgttgtgtggtcagtcaccgatggcagcaccacctgcgagggcacgtgccgattacgattacctcatcaagcttcttcttattggcgatagcggtgtgggaaagagttgtctgcttttgcgattttctgatggttccttcacaaccagttttatcaccaccattggcattgattttaaaataagaaccattgaacttgatggccaacgcattaagttacaaatctgggatacagctgggcaagagcgatttccaactattaccacagc

SEQ ID NO: 29885 - DNA, 430 bp, Glycine max
aggacgccttgccggtttctaaaacaccacattaggggttctatagaagaacaatatcgaagagaggcgtcttccgttattccattcagcgattccattgtggcgaaaggcgtcccggcaatggcggcggaggccgttgccgcccttgacttgacagaatcctccaactggtggcgggacatcaaccgctccccgatctggcaagatcgcattttccacctcctcgccatactctacagaatcgtcgccgccgtcgctttcgttcaattaatgcgatatcaactgaaagcgccggaatatggcttgaccacgcagaaagactttcactttatcaatttcattgtgaatggggttaagggttttgtttctggcttaccccgggatgtgcagaaattgctagcatagattgtccaacatattttacttgaca

SEQ ID NO: 29886 - DNA, 259 bp, Glycine max
  modified_base (218)..(218): a, c, g, t, unknown, or other
  modified_base (222)..(222): a, c, g, t, unknown, or other
cagggggaagcgaagagtgaagagaatggctcccaaggggttaacctttctggctgtgttaatatgcgtttcagcactgtcactgagtccttctgttgcgggggaagggcaaaataatggccttgttatgaacttctacaaggaatcatgccctcaggctgaagacatcatcacagaacaggtcaagcttctctacaagcgccacaagaacactgctntctnctggctcaggaacatcttccatgactgtgctgttcag

SEQ ID NO: 29887 - DNA, 382 bp, Glycine max
gataattgttgaagagagagagacagagagagagagaggatgggttgttgccaatcatcgatgttgctgatagtgggagagagggagactcaccctgaaaaggagaaggaaagggataaggagaaagagcaagcgtacggaaaccaccagaggcagtctgagggaggagaggtctacggcgagaaagaggcggctgatttctcgttcttagagttctcgctggctgagcttaatgcggacaccaacaattttagctttgagtatatcgtgtcagaaagtggcgagaatgcacccaatctggtgtacaagggtcgcctgcagaaccagagccgcttgattgctgtgaagaagttcatcaagtctgcttggcctgatcccaagc

SEQ ID NO: 29888 - DNA, 352 bp, Glycine max
gactgcaaactatgaataagcccttttctcatttctttcatcttctcttactgctgtctgctaattctaatcttaattttctgtttactgtttctttcttccttcatattttatacgcttcttcttcttcaactactactctctctctcaaccttcaaagcttcaaactcaaaagcaatggcatttgatcccgtgcaacccgtcgcaaagaaagcaaggtcaggtggtgagattgtgagtgcaagagagcctctgcttaatggggttcatgactctgaaagctattccgtctctgctgcaattcttccatgtctcttcccagctttgggtggcctactatttggctatgata

SEQ ID NO: 29889 - DNA, 402 bp, Glycine max
gagggagttgtagagaggcgcatgatagcagaatgagttggcgttagggggtggagcccaccgacggttcagcgacatgcggttccggctcgggacaggacctcgtcctctatcggtccactccgcttctgcgaaatttcttcgtctctgtctctgaccccttaacgccttctcgattccgaactccttcaaccctttgtaccattcaacacgccatcgtcatgctcccttcaactctcgctaaataacaatgccaccataaattcactcctccttcttcctcttcttttgatttttgttgattggttcaaactgaagataccctttccatttctctctcgtttctcgtcttcgtagcttgatcaggttttccgattcgtcggcgatctctctctgcattcg

SEQ ID NO: 29890 - DNA, 100 bp, Glycine max
ggagtgagcaagagtgaagagcgaagagaatggctcccaagggtttaatctttttggctgtgttatgcttctcagcactgtcactgagtcgttgtcttgc

SEQ ID NO: 29891 - DNA, 400 bp, Glycine max
cgacaaccgattacattattaacgggataaatgtctaccttgcaaccaaacatacacaaaatgctatacttgtcaacagctgcactgtaccagaatgtctcataggataggcagcgcatctttgtctattgcggtcacatgtggatgcaatactgcgcctttacaaacgtgataactcaggaacttactctgatggatgacctgcgagatggacctttgacactaatgcttgtcccattggatatagattcagagctggtgatatactaatcttaaactatgactcatcatccgacaatgtgtgaagctgaggacacaaatggtatacaactgtttcaagacaccacacatcgctccagtgatcatgccagggaatgacctggtcaaactagtgagatgg

SEQ ID NO: 29892 - DNA, 194 bp, Glycine max
cagacggtttcaacaagactacagaacgggaagcaggagtcccacaacatagatcgtcctaccagaggactattacgaagatattgcactaacgcgacatcgaaatggttgtcatcctctagttcttaaccatctagcagataatcaccctactaaaaggagaatcgtcatcactgatgaactcgcgcatacat

SEQ ID NO: 29893 - DNA, 171 bp, Glycine max
cccacgcttccttacacgcttaaaaacaccttatagatgtcttcctaaatctatctctggagtaaactggcgaaattatccttgactcccagcccattaacttacactccttatatcccaaaaatacaattaaacaacagacccatctaaatctactatctccctataata

SEQ ID NO: 29894 - DNA, 386 bp, Glycine max
ggaagtgtgaagcactgagcagttgaggaaatgggaacccttgggagagcgatctacagcgttggtaactggattcgagaaactggacaggccattgatcgtctcggttcccgtcttcagggcggttactacttccaagagcagctctctaggcatcgaactctgatgaacatatttgataaggctcctggtggtgataaggatggatttgttgcgccaagcgccttcgtcattggagacgttcaacttggtagaggatcatccatttggtatggagttgtcttgagaggtgatgttaacatcatcagagttggaaatggaactaacattcaggacaactctctggtgcatgttgcaaagtcaaatttaagtgggaaagtgttggc

SEQ ID NO: 29895 - DNA, 397 bp, Glycine max
ggttctagtgtgtgattgtttgtggttggagctcgttcttcttcttttgttgttctgtgtttgtgtttgttttttctctcacctgaaaatgtcttgctgcggtggtaactgtggttgcggaagctcctgcaagtgcggcaacggctgcggaggctgcaagatgtacccagacttgagctacactgagtcaaccaccaccgagaccttggtcatgggagtggcacctgttaaggctcaatttgagggtgctgaaatgggtgtgcccgctgagaacgatggctgcaaatgtggaccaaactgctcctgcaacccctgcacttgcaagtgaggtgttgggagagcaagcttcaagcagagatagcccttaattaggaataatgataaactattaatgtgt

SEQ ID NO: 29896 - DNA, 299 bp, Glycine max
  modified_base (3)..(3): a, c, g, t, unknown, or other
tcnaagacgactttgggggtaaaggaaaagttggaaaggctgcaaatttgagaggacaagtgtcgttaccaaccttgtgagctggcgaagatgcatacgatgttcattttgaatgggacagtgacttctgaatttccggtgcattttacattaagaacttcatgcaagttgagttctatcttaagtctctaactctcgaagacattccaaaccacggaaccattcacttcttattcaactcctgtgtttacaactcaaaatcctaccattctgatcgcattttctttgccaacaattca

SEQ ID NO: 29897 - DNA, 422 bp, Glycine max
gacagaaaagaaaaaggaaaccctagctggatagggcaaacggcatcatgtcggacgaagagcaccatttcgagtccaaggcagacgccggtgcctccaaaacctaccctcagcaagccggtaccattcgcaagaacggctacatcgtcatcaaaggacgcccctgcaaggttgtggaagtttcgacttccaaaactggaaagcacggtcacgccaagtgccactttgttggaattgatattttcactgccaagaaacttgaggatattgtgccctcttctcacaactgtgatgttcctcatgtgaatcgtactgattaccagctcattgatattgctgaggatggatttttgagtctgcttactgaaaatgggaacaccaaggatgacctcaagcttcccactgatgagagtctgctcact

SEQ ID NO: 29898 - DNA, 70 bp, Glycine max
ggaagtgagtcgcactgtggagttgaggaaatgtccaccatttgcacagcaatcaacaacgttggcaacc

SEQ ID NO: 29899 - DNA, 398 bp, Glycine max
ggagatggcgaagcgaaacgctgtcgttgcggcactcgcggcgttggtgctactcgcggcgagtgtggcggtggatgctcaggagaactcggacgtgaagacgctggtgaagtacaagcacgggaagaagtactgcgacaaaggatgggaatgtaagggctggtcaatttactgttgtaacctcaccattaccgattatttccagacctaccagttcgagaatctgttctccaagcggaactcgccggtggcgcacgcggtcggattttgggactaccactccttcatcgccggcgccgcgctttttgagccggaagggttcggcaccaccgggaacaagacgatgcagatgatggagatcgccgccttcttcggacacgttggcagcaagacctctt

SEQ ID NO: 29900 - DNA, 167 bp, Glycine max
ggttctagtgtgtgattgtttgttgttgtaactcgttcttcttcttttgttgttctgtgtttgtgtttgttttttctctcacctgaaaatgtcttgctgcggtggtaactgtggttgcggaagctcctgcaagtgcggcaacggctgctgatgctgcaagatgtacc

SEQ ID NO: 29901 - DNA, 403 bp, Glycine max
gcaacaagtgaggatgcatcttctgccattcagggcatggatggtcaggatcttcatggtcgcaggatacgggtgaattatgctacagaaaggtcacgtccagggtttggtggtgatggtggatataggggcagtggtggcagcgatggctacaataggggtggaaactatggaggtggatataacagtggcagcgatggctacaataggggtggaaactatggaagtggcaattataatgttacaagcagctatagtgatggcaatgctgaaactagttacactagtggtgctaatgctggtaattaccaattcaatgaaaattctggtggagtttttggctcagctagcggtgaattcagcagcaaccaaaatgacgcaacaggtgcagacaatgatgaat

SEQ ID NO: 29902 - DNA, 381 bp, Glycine max
cgacggaggttgctgcgaaattaaacgtctgctgagagcatcaatgtctggacctgaatgatgctcaaacccaccagttctgaaccccaatgcatgaactggccatgttgaaaaactcgctggtctcaattcctatctctccggttcccctaattccattgccattcttctcatctccgacatttatggctatgaagcaccaaatttgaggaatattgcagacaatgttgcagctgctggttattatgtggatgatcctgacttcttccatggtgatccatataattctgagaatgctagctggtctatccctgtatggctaaaagaacatggcacggacaaaggatctgaagcttcataatccataattgaagctttgaa

SEQ ID NO: 29903 - DNA, 97 bp, Glycine max
  modified_base (78)..(78): a, c, g, t, unknown, or other
gccgcgagaggacacacgacagagggggcagcgaaaggggacgcaggcgaggggcaacagggcaaggaccggcgggangcacaaacccacaagagaa

SEQ ID NO: 29904 - DNA, 371 bp, Glycine max
ggatgaaccgggcggtccaaagagtctctgctccactttggaacgccttttggcgtgggagaagaagctctacgaggaggttaaggctagagaaggtgtgaagattgaacatgaaaagaaattatcagcgctgcagactcaggaatacaaaggagaggatgaagctaagatattcaaaaccaaggcttccataaataggctgcagtcactaatagctgttacatctcaggctgtgtctaccacctcaactgccactattggccttagggactctgatcttgtccctcagcttggtgatctcattcatggattcatgtacatgtggagatcaatgcaccactaccatgaaattcaaagcaatatagtgcaac

SEQ ID NO: 29905 - DNA, 295 bp, Glycine max
ggttgacaaaggaaacgtgtagtacgagggccaatttccaaaaaccttttgtctcgcaacctcacctcttcctccttcaatctctttcggaatttcccaaaatccttagtgggaggaagagatggttctgactcagaagattcacgaagctttcaaaggcaccgtcgagaggatcactggcccccgaaccgtttccgccttcaaagaaaaaggagttctcagtgtctccgagttcgtcaccgccggcgataatctcgttgccaaatgccccacctgggcctgggaatcgggtgat

SEQ ID NO: 29906 - DNA, 402 bp, Glycine max
gacagagatagaataaaaacagaggccccatttgcgatcttaaacaacctataccctaacgcccttatatcggttcgagcttgctgtactcgacgacttaactgtcaaacggacgccacagtatttatataaagctgcacagccctttacgctagtgcgttaattaatcagcaataccatgaccaactgccgaattatgagtccctcaattgtctcaccttatattttccaaggatataatcggattcccgaatccgcaggaaattcatggggcttttgacttttctatcgcgatcatatgttatcacgagatcagactgttgatggtgctgcataagtatctaatctcactaacataactgcagatgtaagattacatagagatgatgcgtgatatacatc

SEQ ID NO: 29907 - DNA, 452 bp, Glycine max
cgaccgacgcgttcgtaaactactacaaaacgacagatttgggagttttaagggaaaaaaaaaagagtggtgagggggaggtcttccttatcgctcgacatatccataagagcacccactccctcatcttctctcattcttactaccccaaaaccatcttcactctcttttaaccttaccctcactttctccagcgctcactcttcgttccttcatttctccttcctatcttatgcataccatctgtcttccccttcctccactttaggcttgtcacttgaattgaatttctcatataatactgggaccatattacgtataggttctgtcctatttgttagatcaagcaaggctcctctttgtctgactaacagaagcataccaagaaaatcattgtcacgcactcatgttttcctcaaaataattatcacaccacgtctaagatctaattt

SEQ ID NO: 29908 - DNA, 428 bp, Glycine max
aagacgacagaagggggatgatgaatatgctaagcttattagaaggatgaacccaccaagggttgtgattgacaacaatgcctgtgaaaacgcaactgttattcaggttgacagtgtcaacaaacatgggattctccttgatgttgtccaagttatatcagatatgaaccttgtgataacaaaggcctacatctcctctgatgcggtgtggttcatggatgtgtttaatgtgattgatcataatggaaacaagatcagagataaggaagtcattgattatattcagaggagacttgaaaacaatcccagctttgcaccctcattgagagagtctgtaggggttgtaccaactgaagagcacaccgtaattgaactcactggcacagaccggccaggtttactatctgaaatctgtgcagttctcacag

SEQ ID NO: 29909 - DNA, 306 bp, Glycine max
acccacgcgtccgaccactcctacggactgcttgataaaaaacgtcttgaggctatactgatgatctcacttctggaacaggtggtcagtatttatggagcttgattacctgcataagtggcattctttcatcccccaatggatgacatttctggtaccagagagtctcttatttatgttacctctttctacacagggtccggattaaacaaaccagactgtttgtcgacagtgtatgtgtatccaaactattcatctttttccaaagaaatacataggcttcccgctgcttatttaggtgactaa

SEQ ID NO: 29910 - DNA, 290 bp, Glycine max
gaagggcagaaattgtagtgaaagcgataattctagtactagtataataactagtacgaatgatacaaatgatagtgattccactataggagaaagttctaataatctcgatgaaagtcaaaaatataagcatttgtggcttgaatgcgaaaattgttatggattaaattatcaaaaattttttaaatcaaaaatgaatatttgtgaatactgtggatatcatttgaaaatgggcagttcagatagaatcgaacttttgattgattcgggtactttgaatcctatggatg

SEQ ID NO: 29911 - DNA, 380 bp, Glycine max
ggcgtgataccatttaatttgacagcgattaattatttatagttaagtgtggagtgcagtgcaggtcaaggcctgagattcggctctttacttgttgggttgttctgatcttctgtcatagcagtcagatcacactcccatcttctcatctcgtaaaccctaaaccccgttttcagtgacatcgagatcgatcgatcatggatgaggagtacgatgtgatcgtgttgggcacgggtctcaaggagtgcattctcagcggtcttctctccgtctatggccctaaagttctgcgcatggacaggaatgactattacggaggagaattcacttcgcttaatcttattcagcttttggaagagattcaagggagatgacaagcc

SEQ ID NO: 29912 - DNA, 409 bp, Glycine max
ggtgtaatgtaatgaaacgaatgaaatgataggttggtggaggattgagagagtgcggtgttggttaaacatgtggaagtttggtgcttgaacttgaacgccgaacattgcgattcagagagagagagagaagagaatggccatggcccgaagagtccctcgtaatgttttgggattggtcaaaaggaacatgtccttcaaatctttggatcccccttcctccctcacccacggaatccacgtctttcattgccccgatgccgttggaattgtagccaagctatccgactgtattgcctctagaggtggaaacattctcgccgctgatgtttttgttcctgaaaataaacatgtcttctactccagaagtgattttgttttcgatcctgttaaatggccacgggtgcaa

SEQ ID NO: 29913 - DNA, 163 bp, Glycine max
  modified_base (22)..(22): a, c, g, t, unknown, or other
  modified_base (27)..(27): a, c, g, t, unknown, or other
  modified_base (30)..(30): a, c, g, t, unknown, or other
  modified_base (35)..(35): a, c, g, t, unknown, or other
ggggaaaggtaaggaaacgaangaaanganagggngggggaggattgagagagtgcggtgttggttaaacatgtggaagaaggaagcaagaactagaacgccagacattgcgaggcagagagagagagagaagagaatgagcaggggcccgaagagtccctcg

SEQ ID NO: 29914 - DNA, 379 bp, Glycine max
agggatttcacacatcttcctgatcatgggattttccgggacggtggcaaggatatatctgaaccccaaaattctttgtattagataacattgttgcaagatcttaatatacaatgtgcaattcttcttgaaggaaaaactttacatatggagatggaacacccaagaacagtagcataaattcttgctcggagaaaacaggaatgtgatggggttgtagatgaggacagacaaaacagattttctaagatgaccctgattgattatcttcacgcaccagataattatacgtgtgcaccactctttatcaaggatcctttttactattttgattttcaacaagctaatgctgtaaaaaacttggatgattgtcaaactg

SEQ ID NO: 29915 - DNA, 375 bp, Glycine max
gggggaattgaatatatataataagaaaaaggcacaaaaaagaggtgaaaaaaatttgtctggtaaattgttaattctgttgttttgcgtgtttctggactcagggattgccaattgatgtcatggtcttcaccattgccaccacagtttctttgaaactgctcaaggtctagggttctatttaacttctgcacctgagcttttatatttaagagtgtttatagatattgggctagttgatagaaatggaagcaaaaatcgcaaaggcattggatagggttgcactcaatctgaagcgcaagcgagcgacccgatatgccgcacatttaagtggagcttcacaaccaatgttagggcattggtcatcttttacgt

SEQ ID NO: 29916 - DNA, 295 bp, Glycine max
gggtggacaaagttaacagcaaaggtatgtacttttattttgtagggcgttccctccctcttttcaccgattgctttagccttagtcatcattatatgtactgtattccatcaccatccatgaactagttgtcctaaccaaataagaatgcagcgaaagcagaattcttcttctacacagcaaaagaacacacttcattgcaaaccaacccatatcaaagagaaaggtattcctggttcttgatttggggtcctaattttcaattcctggttaagtttggctttaaaaaatggaa

SEQ ID NO: 29917 - DNA, 415 bp, Glycine max
  modified_base (324)..(324): a, c, g, t, unknown, or other
  modified_base (386)..(386): a, c, g, t, unknown, or other
  modified_base (390)..(390): a, c, g, t, unknown, or other
  modified_base (396)..(396): a, c, g, t, unknown, or other
ggtgtgaaaagtgaaacaaaaaacagaacaacaatggcgacacttaaggttcctcagcctcttccccccgttgcagatgattgtgagcagctccgaaaagccttctcaggttggggaactaacgaggagctgattgtatcgatcttggctcataggaatgctgctcagaggaagcttatcagagaaacttatgcccagacctatggagaagatctcctcaaggccttggacaaagaactcacgagtgattttgagaggctggttcatctttggacacttgattctgcttgacgtgatgcatttttggcaaacgaggcgactaanaaatggacttcaagcaatcaggttctggtggaaatagcctgcactaggtcctctgaacaatngttngctgcnaggaaggcttaccatgttc

SEQ ID NO: 29918 - DNA, 394 bp, Glycine max
gaggtgacaaggcaatgcaacttttggagagtggtttgaaggttaaggaatatgaacttctcagaaggaatttcagtgatactggttgcttcggctttggtattcaggagcatatcgatttgggaatcaagtaagttgaagaactcttggatttttatgctggtgttttgacttttgcctgaggtaaacattttaggacttaagggaagctgattatttgatatgggttgtggtgtgcacaatgcattttcaaaattttggatatgacataacatatctcttcccctttaatggtgattccagttttgacttgaaccaaatgctaactggtttataaataatgggaagttaagaattttccttttggtggtttggactttggtgcttatatgaa

SEQ ID NO: 29919 - DNA, 398 bp, Glycine max
gacacagacaaggaaaaagggagaaagaacagttttttttttcttttttttgaataagtctttttctaccctcagttgctctcatagactcttgactctttcagttgtttactaattaacactcatcacattcgttgtgtttggcttcttcactcgctttctctatttttttctcactaaaaagttccatcttttttttttttttttaatttctggggttattattgctttctgtgattctgtctcagttccattttggtatctttgagggaaattcattgggtttgcagggttttatcttgttagaatttagaccaattggctaacagataatagtcttcattgaacatcaatttcaagcattctctctgatttttttgatcaagtggctcttttct

SEQ ID NO: 29920 - DNA, 382 bp, Glycine max
gggttcaagtaagtctcattaagtttccagaagttgctattcgctcactttctctctctctctagctacctccaaccttataatagtcaaacaccctttctttcttctcccccaaccttcttccttcgacacaaaaatttcccaaactccaacaaaacccaaatccaaataccctttttagtattcaatccaaaggattcacctttgtattctcctcacagtggggcatcatctctcagaagaaatttttttacaaagaaagaggaaaaagaaaagaaaaatgttgcagttgttcttcactgtggctttctctgcggttcctctgaccctttacgtgccaccaatccgaagcctaaacctgtttgtggaaacaatggaatat

SEQ ID NO: 29921 - DNA, 413 bp, Glycine max
ggtgcacaagtgagtttgttgatcgagataactagaaacagtgtgatgaaaatgaaggtccttgttttcttcgttgctacaattttggtagcatggcaatgccatgcgtacgatatgttccctctccgaatgaacactggctatggtgcccgtactccggaggtgaaatgcgcaagttggaggcttgctgtggaagcacacaacatctttggctttgagaccattcctgaagagtgcgttgaagcaacaaaggaatacatccatggcgaacaatatagatcagactccaaaacagttaaccaacaagcttacttttatgccagagacctcgaagtccatcccaaggacacatttgtgttcagtatagatggcaccgtactctctaatattccatactacaaaaaacatggata

SEQ ID NO: 29922 - DNA, 424 bp, Glycine max
ggaggaagcgcagcagcagcagctataccacgttgcttgaagaaactgataaaaagcgctgccgttgtgtctttcagtcttcgttggatcatcttcacaatcacatcatcagaacacaaagaagagaagagacccttcatcttgttattccactcgggctaggccaattttccctctaacagtcaattttcattcagattcgtaaatttctcgattagatcacgaggtgttggtgtgattgtttgtaccttctggtggtggagcttgttggaaattggagatgagtcagaggggtttaatatatagctttgttgccaaaggaactgttgttttagcagagcacacgcaatatacggggaatttcagtaccattgctgttcagtgcctgcagaaactgccttcaaatagcagcaaatacacatat

SEQ ID NO: 29923 - DNA, 402 bp, Glycine max
  modified_base (353)..(353): a, c, g, t, unknown, or other
ggttgtgttgttttgtgtgtgcaatcctcattaccattgccgccgccaccaccaccgcctatcaccctctcatccaccaactgatacccgtaacttcttcaccttcctctccttccccaatttaaaactaaataaaaaaactgtccactaaggttgaggcacgtcaccatctcgtccttcccctcgctcatctcaaatccatggttcggaattagggtttccatttggatttcgcaattctggtgcccgatttcttgactccgagagagggaaaaggggaaagcgatgaggatgaggatttgggtattggagatcgtgttcgccatatttctctgtgggaccctctcatgcanccgccaacctcatcataatagggtttctctcttaaccaccacaagtatc

SEQ ID NO: 29924 - DNA, 67 bp, Glycine max
gaaccaagtatatgtaattaattatgttagctgcttttaacagcttggatatatagatggtttgatt

SEQ ID NO: 29925 - DNA, 374 bp, Glycine max
ggagaaaagagtgacactaatttcaaatggaaattgctctctcataacagaattcaagaggaggaagaacaagtatataaaaactatatctacatagttatatctctctcttgagatttcaaacgtagagatatggaatggaggaagtgctacttggatgtgatattggtgcccttgggatttctaacaagcattgggtaccatttctggctatggcacaaggttcgaactcagccacacacaaccatcattggcatcaatgctagtggccgtagaaattgggttaatggcatgatgaaggacaatgacaagaaaaacattctggctgttcaatcactaaggaacacaataatgggtgctactctaatggccac

SEQ ID NO: 29926 - DNA, 157 bp, Glycine max
gggaagtgcaagtgtggcactaactgcacttgcacggactgcacctgtggccattaaggaatatgtatgaaaatgtaattgccatgtgtttggcaatacaaatatccaaataatgtaatcttcgtatgaataaatgtgtgtgctgttatcctactgc

SEQ ID NO: 29927 - DNA, 398 bp, Glycine max
ggcgatcagcagcatcagctatactactactacgactactaattcctctggaagtgggagcagctccataaatagcaagttctcagtgtcaagcggtgatcagccttatccaaatggacagatcttacctacctctaatttgaggattttcacttttgccgagttgaaggctgcaactaggaatttcaaagctgatacagtgcttggggagggaggttttggaaaagtcttcaagggttggcttgaagaaaaggccacttcaaagggtggaagcggaacagtcattgccgtcaaaaaactcaactctgaaagcttacaaggacttgaggagtggcagtccgaagtaaattttctaggacgtctttctcataccaatcttgttaagctgttgggatact

SEQ ID NO: 29928 - DNA, 195 bp, Glycine max
aggcgtgcgaacaggtgcgagaggaccaccgacggatgatcgtgagcacgaggacaggccacgttaaagttgttctagtacagagaaaaggagacacattagctactgtgttgcaactgttgcagtggccattaagggaacctcttgctgtgagacaatggtatcgcacatggcaccttggactgctgaagaaga

SEQ ID NO: 29929 - DNA, 409 bp, Glycine max
gacggctaaaagctaaatatcatcaaagtactcaaattagcatggctgtcatggttgcattcttgaatttgatcatcatcttttcagtagtctctacaacaggcaagtcactgagcttaaactactatgcaaaaacatgccctaatgtggagttcattgttgccaaggcagtaaaggatgccactgctagggacaaaactgttccagcagcaattctgcgaatgcacttccatgattgtttcgttcgggggtgtgatgcctctgtgctgctaaattcaaaaggaaacaacaaagcagaaaaagacgggccaccaaatgtttctttgcatgcattctatgtcattgatgcagcaaagaaagcactagaagcttcatgccctggtgtggtctcttgtgctgacatccttgc

SEQ ID NO: 29930 - DNA, 385 bp, Glycine max
gaggacaataggtggccaccgtggttgaagccactgctgaaagagagcttctttgttcaatgcaagttgcatgttgattctcacaagagcgaatgcaacatgtattgcttggactgtatgaatgaccctctctgctctctctgcctcgcccaccacaaagatcaccgtgcaatccagattaggaggtcctcataccatgatgtgatcagggtctctgagattcagaaggtgttggacatcactggtgtccaaacctacattatcaacagcgcaagggtggtgtttttgaacgagaggcctcaaccaaagcctggaaaaggtgtcacaaacacttgtgaagtctgcgagcgtagccttcttgattctttccgcttctggtctcttg

SEQ ID NO: 29931 - DNA, 365 bp, Glycine max
ggcgtaggcaaagagagagagagaaaagcgtgaatcatgtcggacgaagagcatcacttcgattctcaggcggatgcgggagcgtccaagacgtatcctcagcaggctggtaccattcgcaagaatggctacatcgtcatcaaatccaggccttgcaaggttgtagaggtctctacgtcaaagacaggcaagcatggacatgcaaagtgtcactttgatgcaattgatatttttaatgggaaaaagcttgaagatattgttccatcatcccacaactgtgatgttccacatgtgaatcgcactgactatcagcttattgatatctctgaagacggctttgtgagtctgctgactgataatggaaa

SEQ ID NO: 29932 - DNA, 399 bp, Glycine max
gggctcggagttggtcttatgttgaacgtccgggtttgttacttgttgcagcttttgttatcgcccagctgatagctaccttaattgcagtttatgcaaattggagtttcgctgctattgaagggattggatggggttgggctggtgttgtttggctttacaacctcatcttttatatcccacttgactttatcaagttcataattcgatatgccttgagtggaagggcttgggatcttgttattgaacaaaggattgcttttacaaggaaaaaagattttggaaaggaagaacgtgaacttaaatgggcacatgcacagaggacgcttcacggccttcacccaccagagactaagatgttcaatgaacgtacaagttacacagaacttaatcagatgg

SEQ ID NO: 29933 - DNA, 396 bp, Glycine max
gagcgaaacagagagtgatttcagtgagtgatcggtgttcacttgatctcatcataatcgtcagcgtcaattgaagaagatgccgatcagaaacatcgccgtcggaaggcctgaagaggcgactcaccccgacacgttgaaggcggctttggctgagttcatctcaaccttcatcttcgtgttcgccggctcaggctccggcatcgcctacaacaagctcaccgacaacggcgctgccacccctgccggcctcatctccgcctccatcgcccatgcattcgccctcttcgtcgccgtctccgtcggcgccaacatctccggcggccacgtcaaccccgccgtcaccttcggcgccttcgtcggcggcaacatcaccttccttcgcggcatcgtcta

SEQ ID NO: 29934 - DNA, 396 bp, Glycine max
ggaatgcgatttttgtgtgttgaactatcaagctacatcatcggatctatctgaatggggaaagcactatcgcgaattcaccgtgtcagtgtcagatacattcaattcacactctttattgctttcgtctccattagtttcgcattgcattgcttccttatcttttccgccacttcactctttctgttcttttccccgcttccgtttattatatttatataatatataattttttgaagtcgatgcattctgagaatgtaaaacctcgttttagtttttggaaaatcaaatcccctccattcttcttcttattaattaaacctgaaaaactgtttaactgagtggctaggaatacttgaaagtggagtgtaactcattttacacttcacaattttg

SEQ ID NO: 29935 - DNA, 419 bp, Glycine max
ggagcaaaggttcatcttgaacagaagattgatccaagcatacttggtggtcttgtgcttgaatttagccagaaggtctttgacatgtcaattaagaccagggcacaacagatggagaggatcctccgtgagcctgtatcgattgccaacatctagaagacaacagttgctcctgacaatctgtgttatcatggtttaaagaaagaagtattacattcttgttcattacaaattgtgtggatctatatttttatgggatggaatgccatcattttgcaaataaaagctacctcttcccaacttcttgttatgcttcattgccatttcagtgtatctgaatatattttgatttggtattttgagattttaattagtgggcttctctcgtaatctggatgcctaataatgatgcttcttac

SEQ ID NO: 29936 - DNA, 399 bp, Glycine max; identical to SEQ ID NO: 29932

SEQ ID NO: 29937 - DNA, 398 bp, Glycine max
gaagaagcagggtaaacattaaaatcaatcggaaagtggagatgtcacggagaatcgggacaaagctcttcgtccacagagcagctcaagaagttgttctctccattcggactagttacccaagctgatctagctttggatcctataaccaaaaggcccaaagggttcggctttgtctccttcaaatctgaaattgaagcggaaaaggctttgagagccatgaatggcagggtaattttctcttatctatatccactttattaaacaaaaatgtgctaggcatcgtatattggtatgcttggattaactacattgttgttgtaagtgactatgcactgaaggtgtttgttgaaatgaccgattgattggtgattgcaatttataaagatatataatat

SEQ ID NO: 29938 - DNA, 345 bp, Glycine max
ggccctaaactgtggaatggaaaaagggtgacagtgatactgtgtcatcacacacacatgatgaacgagtttaggtattcatgcaagagcgctcaccaaactcttcaatggatcaacgaaattatacacttcctcacgccttactcttccttaatcaatgctcacgtcgttaatttcttcaaggataggctatgggagaatgttgacgccgaatggatcgaatgcctgcgccgagaatctgttcaaaatcttcttctcataccttctggtgcagtacaggatcaatggccaacttctttgaaggagttcatcctaaaaataaggtctatggtattttgtcaagaa

SEQ ID NO: 29939 - DNA, 381 bp, Glycine max
ggaaatcgagaagaagaagaagaagaagatggagaagtatcagatctggagcaggagaatagcgttggcagcgtttgcgtttgctctgctgttccaatcggcctcagcagacgacgtcgttgtgctctctgaagataacttcgagaaggaagttggtcaggacagaggagctctcgttgagttctatgctccttggtgtggacactgcaaaaagcttgctccagaatatgaaaagcttggtagcagcttcaagaaagccaaatctggtttaattggcaaggttgactgtgatgagcataagaagttgggcagcaagtatggagtctctgggtacccaacaattcaatggtttccaaaaggatctcttgaagcccaaaagta

SEQ ID NO: 29940 - DNA, 410 bp, Glycine max
ggtatttggaggaaggaaggtaaaggaagcaaacgcaagagcaagagcaagagcgaaagcggcagagaagatggaaggagaagagggttctcagcagccacagttggtgctcgcggacaagctattccttctccggcaacccgatgtgcaagacattgacaaggttcgctacaaagaggatgtcttcactcatgtcaaggaaaacgatatggtccctctgtacgaaaccctagtcgctgattccgtgttggacttggatcgtgcccttttggactctatgcgcgctaaaattgacgacgagctcaccaagctcgacgaaaagattgctgatgccgaggaaaacttaagagagagtgaaattcgtgaggctcatttggcaaaatccttggttttcattcggattatggaca

SEQ ID NO: 29941 - DNA, 400 bp, Glycine max
gatcgacatggagggtctcatcaacggcttcatcaacgttgctctcggagctgatggtggcgatcgggaagaacaacaacacgggagagacgaccgtagtagaagctcctgggctgaagtcgtctcccaggatcaacaagatcaccctcttcctcatcaccaacacaaggaacaatatcgtcctcagtacgaggagccccaatctcaaagttcctacaaaccccagaaggtggatgaaggtgaagatggatggcagactgttggtagaaagccttcaaggcatccacataaggttcaaaaggacaactggaacagctataaacgacctgctgatgagcaagaatactctaatgaagttgaagttggtgctgatgtggagccctcaaaagatgaacttact

SEQ ID NO: 29942 - DNA, 396 bp, Glycine max
gactgagcgtggttattccttcaccacctcagccgagcgggaaattgtaagggatgtgaaagaaaagctgtcttacattgcccttgactacgagcaagaactggagacagccaggaccagctcatccgtcgagaagagctacgagttgcctgatgggcaggtcatcactattggcgatgagcgtttcagatgtccagaggttctgttccaaccatccatgatcggaatggaagcttcaggcattcatgagacaacatacaactccataatgaagtgcgatgttgatatcaggaaggacctttatggtgacattgatctttcaggaggaacaaccatgttccctggtattgctgacagaatgagcaaggaaatctctgcattggcacccagcagcat

SEQ ID NO: 29943 - DNA, 359 bp, Glycine max
ggttgggagggaagcatgaaggaaatttagtaaagggaagtatactcctgcattgtttaaattcacttcttaagcattcagctgtgctggtgcagcccctaagtaggtttgaccttgatgaatctggaaaggtgattacaatggatatccctttgcccttaaagaattctgatggatcaaatacctatgttggaaaagacttaggattatgtgaaggggaaagttcaaaactgaattctctcctgactgatttggcaaacaagatggaactgtggacggttgggtatattcgcctactgaaattatataatggacgagaatcaaaccagttctcacctgaagaagagaagtatgaatgg

SEQ ID NO: 29944 - DNA, 372 bp, Glycine max
tagagagggatgagaaagaaattactattgcacaagatgaacgtagtggcatggctccccctctctttggtgaactggtatatgatattgcatacttttcctttaattttaatttatttgtcatcagtttttttttttaaattgttataattatattaactgtatacgtgcttgcttgcaggttgaaattccaaacttagagagcttgaatttatcctcagtcagtatccataagatatggagtgaccaaccactgtcaagtttctgctttcatagcttagtaaaattagttgtgaaaggttgtgataatttgagatatttatgttcattgtctgtggctagtggtttgaagaaactgaaaggactcttcgt

SEQ ID NO: 29945 - DNA, 431 bp, Glycine max
gataaggatgcagccagtatcttgggcaaactcacttctgaagcaggcaatgaagagtgggatgatagcttactgaccaaagaggaagtagaggcaagattgcagaggaaggtggaagcaatcatcaaaagagaaagagcaatggcatttgcatattcacatcagctatggaaagccactccgaaatcaactcacaccccgatgacagatacacgatccagtggattcccttggtggtggaactggttggaaagacaaacacctgcagcaactccacaagaaagacaaagcttgaagaattttcaaatcacaccttcaagaccatactcagagcaaaagactagtccaagacctggctccagcactcaaaggcagccgcagtcgcagcagcagcagcctcatgtttcctttgataatatggacacttccac

SEQ ID NO: 29946 - DNA, 375 bp, Glycine max
ggcacaaaaatacaatacaaaacaaaacagagcaaagagagagtgtgtgaaaagtgaaacaaaaaacagaacaacaatggcgacacttaaggttcctcagcctcttccccccgttgcagatgattgtgagcagctccgaaaagccttctcaggttggggaactaacgaggagctgattgtatcgatcttggctcataggaatgctgctcagaggaagcttatcagagaaacttatgcccagacctatggagaagatctcctcaaggccttggacaaagaactcacgagtgattttgagaggctggttcatctttggacacttgattctgctgaacgtgatgcatttttggcaaacgaagcgactaaaaaatggac

SEQ ID NO: 29947 - DNA, 390 bp, Glycine max
ggaggaaaaggaaaggaaagggaagccaaagcgaaaccctaaccctaacggagagatggcggagcacttggcatcgatattcgggacggagaaggacagggtgaactgtccgttctacttcaagatcggcgcgtgcaggcacggcgaccggtgctcccggcttcacacgaagcccacaattagcccaacgttggttctgtcgaacatgtaccagaggcccgacatgaacatgaacatcatcaccaaccccgatcagccccagccccaatctctcgaccccgataaggtccaggatcacttcgacgacttctacgaagatctctttgaggagcttagcaagtacgggcccattcagagcttgaatatttgcgacaacctcgccgatcatat

SEQ ID NO: 29948 - DNA, 402 bp, Glycine max
gaatagaatatgaaaaagaaaaaaaagattctaaagaaatataactaatattctttagaataatcaaaaagaatattaaattcaaataaattttagatagaaaaaagacttaaaaaggaggatttgaaatgcgagatctaaaaacatatctttccgtggcaccagtagtaagtactctatggttcggggctttggcgggtctcttgatagagatcaatcgtttttttccagatgcattgatattcccttttttttcattctagttattgacacggaaaggggtgaagaagattatagatccaattaagtattaaatatatgtaattaatatgtaattaatctcctcttctttatttcgtcttttatttcttcttttttttacaattgtaatagaataagtca

SEQ ID NO: 29949 - DNA, 367 bp, Glycine max
ggagagaagaagaggttgttgggttgagttgggtttggattggatttctaatctaatctatacctttctttttcctatgcttttaaggcacaaatccttctcccttctctcttctttcttcttcttctcctgacccttattattattccttgcccttaccctttaggcaagggaaggaagaaagaataactatattattatctttattgtaatctatctttttattataattataattataattattgttgttattattccttaaatatggattcgccgtgtctctccaacgattcggtttctggattcaaagacaaggagtcaatggttgacccctttttggtcgaggctcttcagaaccctcgtc

SEQ ID NO: 29950 - DNA, 406 bp, Glycine max
ggagactcgaagtgtgaagcactgagcagttgaggaaatgggaacccttgggagagcgatctacagcgttggtaactggattcgagaaactggacaggccattgatcgtctcggttcccgtcttcagggcggttactacttccaagagcagctctctaggcatcgaactctgatgaacatatttgataaggctcctgttgttgataaggatgtatttgttgcgccaagcgcctccgtcattggagacgttcaacttggaagaggatcatccatttggtatggagttgtcttgagaggtgatgttaacatcatcagagttggaaatggaactaacattcaggacaactctctggtgcatgttgcaaagtcaaatttaagtgggaaggtgttgcctacaattattggg

SEQ ID NO: 29951 - DNA, 399 bp, Glycine max
gatggagcgacgggacaaggaaagacttctcaagattcgaacccttggaaatatccgtttaattggtgagctgttgaagcaaaaaatggttcctgaaaagattgttcatcacattgttcaggagcttttaggacctccagatatcaaggtctgtccagctgaggaaaatgttgaagccatatgtcagtttttcaacacaattggtaagcagcttgatgaaagcccaaaatcacggcgtataaatgatatgtactttatccggttgaaagaattgagcaccaacccccaacttgcaccacggctgcggtttatggttcgtgatgttctagatttgcgttctaataactggattccaagacgtgaagaagtgaaagccaaaaccatcacttgaattcattc

SEQ ID NO: 29952 - DNA, 393 bp, Glycine max
ggagtaagggcggtgcagtgcttcaaacccctttttctcttctcatttcctttcatcactctcttgcttcttttcttcttctcgcaattttccattttcacacttttagcaacatcttttaatggcgtcccaaatccgtgagtggtctggaatcaatacattcgcacctgctacccagactaagttgcttgaactcttgggaaatcttaaacaagagaatgtgaactccttgactatacttgtgatgggaaaaggaggtgttggaaaatcttcaactgtgaactccatcattggggaaagagtggtttcgattagtcctttccagtcggaagggccaagacctgtgatggtgtcacgatcaagggctggttttacattgaacattattgacac

SEQ ID NO: 29953 - DNA, 392 bp, Glycine max
ggtggaagagaaagaaaagaaaacagaggacagcgaggagtgagagagaacaaaagacgaatccagagagagaggagaagaaaagaaagaaaaaggaagtggctgctaacaaggatatactgtgatgccgactctaagaattcatggatatgccttgcttgtttcatcttgtttcatcatcctcatagcagcctcacaaacagatccttcagaagtaaatgcactgatagacatcaagaaaagtttgattgatcccatgggcaatatgaggaactggaattcgggagatccgtgtatggcaaactgggcaggggtttggtgctctgatagggaggaggctaatggttacttccatgtccaaaagctctacttaatgactatgaatctctcgg

SEQ ID NO: 29954 - DNA, 408 bp, Glycine max
  modified_base (352)..(352): a, c, g, t, unknown, or other
ggagtatcaaatatatagcaagacatagcaagacaagatatgagggagaaaagaaaagggtggtgaatgtgaaaatagagggagcatgtggaatggttgtggtcactattatatatgttgtctcttacgctttgcatgtgactttctttctttctttatatcctttatatattaagtatatgctgcaatatatttaattaaagagagaagtaacatcaaggtgcagagagaggaattgaagcatgggaagagggaaggtggttctggagagaatacagaacaaaatcaatcgccaagtaaccttctcaaagcgcagaaatggtttgctcaagaaagctttcgagctatctgntctatgcgatgctgaaatcgctctcgtcatcttctccaaccgtggcaagctttttc

SEQ ID NO: 29955 - DNA, 430 bp, Glycine max
ggaagaaaggcagagttattgccattgcctctgcctcttgcaacaccaaactgatacacacttaataatattatagtaaaaattagccaccaaagtacactaaccccttttttcatacaactcaatagctggattggagcaaggtgaaagtaaaatcatttgcaaccaatgccgttgaacatatttcaggacaaagatggattgccacggattatattgactgagccaaagggttcatcagctgaggttcttctttatggagggcagattatttcttggaagaatcatcgaaaggaagaacttctttttatgagcagtgaggctaacaagaaacagcataaagcaatcagaggaggaatatcagcttgcctagcacggtttggtgatctcagttcacttgaacaacatggatttgcaagaaacaggatgt

SEQ ID NO: 29956 - DNA, 420 bp, Glycine max
ggaaggtgatgatggaattggaagtcgacgagaacgacttgaaagccgccggtgctgagctcttcgtcgacggtggtcggcgcggcattcgcatcaatggctgggtgatcgagactcggaggcactccatactcaactcttccacactccaagagtgggaacagaatctcgatacgtctcatttaccagaaatggtttttggggaaaacactttgattctaaaacacttgagcagtggcaccaacattcattttaatgcatttgatgctctacgtggctggaaacaggaagcattgccgccagttgaagttcctgcggcggctaaatggaaatttagaagcaagccctctcagcaagtaatacttgattacgactatacatttacaacaccttattgtggaagtggcactatggagattg

SEQ ID NO: 29957 - DNA, 405 bp, Glycine max
cagtgaaagccacctggagatggtgaaagctggtgagaaatgggcaaaagacacagctggttctttcactcttgtgggtactctcatcactaccatcatgttcgctgcggctttcactgtccccggtggaaaccatcaagaaactggagcacccatcttcttacacgatcacatattcactttgtttatcatagcagatgcaatatctctctttacttcttccacttcagttctgatcttcattgggatcctcacgtcgcgttatgctgagaaggatttcctcaagacactgccgttgaagttactttgtggccttgtgacccttttcttgtcagtggtggcaatgatggtagcattttgtgcttcgcttgctatgatgctgaagggatatcaacgactcataat

SEQ ID NO: 29958 - DNA, 411 bp, Glycine max
ggggattaggctgtacatgcaagagattgacactaaggcaggcaaagcaaattccacaggattggtgatgcttagtactagaaacattggaagttaccaatcaatccaagaaatgatgaaggctgattccaaatctccttgggggaatcatatttctttcttgcacgtacccatacctaagctaagccaagccagcctatccaacccccttgaatttgtttggagagcccaaaaaataatcaagaggaagagaaagtctttcactgattttctcattgaatggcttttagatatggagctgaaattaagaggacacgaggccgtggctaaacatatctatgggacactaagagactcaagtgttgtcgtatccaacttgattggaccaatagaacctatggctttggcaaa

SEQ ID NO: 29959 - DNA, 409 bp, Glycine max
ggtggaagtattcgcagaactttgtttcccaatttccattgcctccgcttccacctcgcaaccatgatcatcccggagaagaaccgcaaggagatctgcaaatacctcttccaagagggagtttgcttcgcgaagaaggacttcaatttggccaagcaccctgagatcgacgtgccgaatctgcaggtgattaagctgatgcagagtttcaagtctcgcgagtacgtgagagaaacttttgcttggatgcactattactggttcctcaccaacgatggcatcgagtttctcagaacttaccttaaccttccttccgaaattgtccctgctactttgaagaagcaagccaagccacctggcaggccctttggaggcccatccggtgatcgccctagaggtccaccacgct

SEQ ID NO: 29960 - DNA, 305 bp, Glycine max
tgagataaatggggaagtcaatactcaaaaatctgaagttagctcggaagtgctcaaggagtcccttgctgagaaggatagtgatgaccacaaagttcccgagaatggatgtgctacaaaaaactggagatgccccaaagggtgctaaaccagttgttcctgagagcaagattgtagccaatggggttgtttctaatggttgctaagctctactgtgtttgaaggaggcggtcctatccatttcagtggcatatattgggtcttagaaagtatttatcagaaaacttgtacccgcctgatttatc

SEQ ID NO: 29961 - DNA, 412 bp, Glycine max
gtctgcggatgatggtaaaagtgttgttatgaagggtgtgactcatggtgcttgtgattacttaattaagcctgttcgcattgaggctttgaagaacatatggcagcacgtggttcggaagaggaagaatgagtggaaagacgcggagtaatcagggagtgctgaggaaggagatcggcaaccaagggcttctgacgaagcagattactcttcctcagcgaatgaaggcagttggagaaactcaaagaagagaagggatgaggaagaggaggcagaggatagagatgacacatccacactaaagaagccacgggttgtttggtccgtggagctccatcaacagtttgtggctgctgtggatcaactgggaattgacaaggctgttcctaaaaaaattctggaattgatgaat

SEQ ID NO: 29962 - DNA, 375 bp, Glycine max
gcgagcaggagaaggaacgagcccgcagagaccgtctctaccacatgaaccgctcaaaccctaaccaacagcgccgcgaagccgccgtcttcaaatcctccgtggatatccaacccgagtggaacatgcacgaccagatccccttcagcaccttctccaagctctccttcaccgttcccgaacccgaagacctcctcctctgcggcgccctcgagtattacgaccgcacctacgatcggatcactcccaaaaacgaacgccgcctcgaacgcttcaagaatcggaacttcttcaaagtcaccaccaccgacgaccccgtcattcgcagactcgccaacgaggacaaagccaccgttttcgccaccgacacgattc

SEQ ID NO: 29963 - DNA, 402 bp, Glycine max
gatgcacttgccattgcagcagatattggatacccagttgttgttcgtccttcttatgttttgggtggtcgagcaatggagattgtatatagcgataataaactggtgacttaccttgaaaatgctgttgaggtggatccagaacgccctgtattaattgacaagtatttatctgatgcctgtgagattgatgttgatgcactggctgactcacaaggtaatgtagtcattggtgggataatggagcacattgaacaggctgggatacattctggtgactctgcctgctctattcccaccagaactgttcctgcttcttgcttggagacaatcaagtcgtggacagtaaacttggctaaacaattgaatgtttgtgggctcatgaattgtcagtatgcaata

SEQ ID NO: 29964 - DNA, 425 bp, Glycine max
  modified_base (416)..(416): a, c, g, t, unknown, or other
gaagccaaagacggtgcaaggccaagatcttcttcagctccttcataggtgcatgagtttcagattgaattggtttttgggcaccaaatagcaatggccacggtggagaggatcctgttggccctgcagaatgagggtgcaggaggagaatccttgttggggtcaataaaaattgctgtgatgcccatagttaaagtgttcaccatgtgttccttgggactccttatggcttccaagtatgttaacatcttgcctgcttctggaagaaagcttttgaatgggctggtctttacactcttgctaccttgcttgattttctcccaattgggacaagctgttactttggagaagatgcttgcttggtggtttattcctatgaatggtgtcctgagttccataacaagctcactcattgngtttggtgg

SEQ ID NO: 29965 - DNA, 350 bp, Glycine max
ggtgagtgtgtgagagagagagcgagcagtttcagacacagagagaggggtttgggattggagggattgacgctgcgtctcttcctcttctctttcgatccatccctcattcctaatcctccaatccaaccacctcagcctcacactcacatatacacatatctgaacgcgtatcgtccctcctatggcttcaaagcgcatcctcaaggagctcaaggacttgcagaaagacccaccaacttcttgcagcgctggtccagtagctgaggacatgttccattggcaagcaacaataatgggtcctgctgatagtccttatgctggaggtgtattcctagtcactattcact

SEQ ID NO: 29966 - DNA, 399 bp, Glycine max
gacggcaaggactaccaggagccggcgccggcgccgctggttgacccgacggagtttacgtcatggtcgttttacagagcagggatagcagagtttgtggccacttttctgtttctctacatcaccgtcttaaccgttatgggagtcgccggggctaagtctaagtgtagtaccgttgggattcaaggaatcgcttgggccttcggtggcatgatcttcgccctcgtttactgcaccgctggcatctcagggggacacataaacccggcggtgacatttgggctgtttttggcgaggaagttgtcgttgcccagggcgattttctacatcgtgatgcaatgcttgggtgctatttgtggcgctggcgtggtgaagggtttcgaggggaaaacaaaatac

SEQ ID NO: 29967 - DNA, 359 bp, Glycine max
ggcacagattagggtaatccaacttccaaaccctaaaagtctacgcttttaattttctgttgttttctctctcaaatcggtgctcccttcggcggcgcgtgagggtttccagcggcgcgtgagggtgttattcgcgcgttattccaagttccccgctgacctatgctttgtccgacccacattggagagttcacgccggagagaaggcggaatctcactggacggccgtgatttggcacctccatggcttccgccgtccttgctaatcggaacgaacctaattggcaacggcatagaggcggtggagctggattcatgggaaaaacacctttctctaaccctaattctaaattagcgaa

SEQ ID NO: 29968 - DNA, 416 bp, Glycine max
ggggagaaggaagaagattgacagagagagaggaaggagcgcgaaaagactaaattgaccttggatcttcgtctttcctctctctccgattcgtttttcgttggtcttctaaaagcttcttccaccatgaacagcaaggccaacgtttccaaagagctcaacgccaagcacaagaagatactggaaggacttcttaaattaccagagaatagggaatgtgctgactgcaaagctaaaggtccaagatgggctagtgtaaatcttggcatctttatatgcatgcagtgttcaggaatacatcgaagtttgggggtacatatatcaaaggttcgttctgcaaccctggacacttggcttccagagcaagttgcattcattcaatcaatgggaaacgagaaagcaaattgtttctggga

SEQ ID NO: 29969 - DNA, 347 bp, Glycine max
ggaagaaaaaaggaagggtaagtaaattgggaatggtggtggtagtgccaggtgtctgtctgaggagaaaatagaataaaaagctatgaaattttggcacaaggtctgattgtagaattgaagaagatgactggggggggtatcactatgcaatcgacgccgggaagctcaggatacttggatttgtatccagagcggaagatgtcctttttcaaaaatccttacattctcggactggctgctgtcgccggcatcggtggtctcctcttcggctacgacactggtgtgatatcaagggttcttttatacattaaagatgattttgaagaagttagaaacagcaatct

SEQ ID NO: 29970 - DNA, 315 bp, Glycine max
aggcagccaaagaaaagaaaatcctcaattttctgagcagccaaacactctctctctgtctctcgaaaattctcagtttgcagagaaaatctgaatcatgtcgtggcaagcgtatgtcgacgatcaccttctgtgtgacatcgaaggtaaccacctcactcacgctgctatcatcggccaagacggcagcgtttgggctcagagtaccgacttccctcagttcaaacctgaggagataactgccatcatgaatgactttaatgagcctggatcacttgctccaactggattggatctcggtggcaccaaatatat

SEQ ID NO: 29971 - DNA, 373 bp, Glycine max
ggcgtcggaaggaagagaagatgagtgtgaatttgatggagaaagtgagcgcactgggagagcgcctgaaaatcggaggcgtggaagtggggagaaagatgagcgaggggatgagctccatgagtttcaagctcaaggagttcttccagcctgggcccaatcaggccgacaagcttgtggaggacgctacttccgaggccctggacgagcccgaatgggccctcaatctcgatctctgcgacctcgtcaacaccgacaagctcaactgcgtcgaactcgtccgcggaatcaagaagcggatcattctcaagagccctagggttcagtacctcgcccttgtcctcctcgaaaccctagtcaagaactgcgagaa

SEQ ID NO: 29972 - DNA, 386 bp, Glycine max
gaaagagcaaggaccagagataacaatttgttgggcaaatttgagctatctggcattcctcctgcacccaggggtgttcctcagattacagtgtgctttgacattgatgccaatggtatcttgaatgtctctgccgaagataaaaccactggccagaaaaataagatcactatcaccaatgacaagggtagattgtcaaaggaagatattgagaagatggttcaagaggctgagaagtacaagtctgaggatgaagagcacaagaagaaggttgaggccaaaaacgctttggaaaactatgcatacaacatgaggaacaccgtgaaagatgacaagattggtgagaaacttgacccggctgacaagaagaagattgaggatgccat

SEQ ID NO: 29973 - DNA, 424 bp, Glycine max
ggactcacaatatatcaaactatattgttggactacttggcttcaaccaagttctcattagaatccaagatgatggagaaggaaagagaagatgagattgaggacatgtcaatgtcacctccatctattggctccatgcagattgcagggagcaatggctttggtcacagcatggagttcatgtctcaggcataccttccaaatatgtacacagagattgacataaaagttcaggattcaagtttcaaccaagatccccccctccccatttatctcaagtttgaagatgtagagttcagggtaatagatagccaatcggcttccaataaccctgtgaagacaatgatgtcaaaagtaggcacccaacaccacgtggaggaagatagatgcaagaaaattttgaagagtatcacaggaagcattg

SEQ ID NO: 29974 - DNA, 362 bp, Glycine max
gtcctagtcaaagtgttgatggtattctgccagtcagtgccaactttgtcagcaagaaccagaaaatgaatctcaggaccataatcatcattgctttatcttcctttgtactcttgctggttttggtgggagcattttcaattattttgaaatggaggaagactgggagaccctcaagtgctgttggccctgcattcacatcatctctaaacaagagatcaggcttggggtctatgttgtcaagtagtattacaagctcgacatcaatttcacttatgtccacaatggctacttcccttctctctgttaaaacattttcactttctgagcttgagaaagcaacagataagtttagttcaaag

SEQ ID NO: 29975 - DNA, 160 bp, Glycine max
gtcacgcctgctgccagatgacagcagattcggaaagagcgcgggccaatgatggccatgtgtttggcaaattttggctatctgggatttctcctggacccacaggtgttcctcagattacagcgtggtttgacactggtacccaaggtgtatttaatgt

SEQ ID NO: 29976 - DNA, 409 bp, Glycine max
gatgatagggtttggagggaacagttgcagtgagctttctgagatggacatgatgaacatggaaactaataataggaagtttctttctctgcctctcagtaacaacaacaacaactctggtaatgcccaaatgcgcagtagtagcgataatagaagggtacctgtcactagcaatagcaatatcgctcaggaacatcactacagccaccacaaccccaccgacacttgcagtgtgagggataaaatcatggcacaccctctttttcctcgtctcttgtcctcttaccttaattgcctcaaggtgatgatgaactctaaattgttctccatattaacataaattacacacatatctttccctttcttcctaacacaaattgtccttatatagaatatgtaaggttggttt

SEQ ID NO: 29977 - DNA, 279 bp, Glycine max
gaaagaggggtgatcatgaaggccactggtgttaggcacacttgggatgcttggtatatggcaggtacacatcggtgtagcgctgagtacagctggagttttccttggattcgaggggactttctattgatcaggcctatggagagccactggtcgaaaaaggattatatcggtcttcgactgcaaagggttatttataaagggaggatttgataataaggagtagctcctgtatgaaaccgaagttaagcaaaagctgtcaatggaatagatgcgggc

SEQ ID NO: 29978 - DNA, 414 bp, Glycine max
gaccacaagaagaagaagaagaagaagaagaagaagaaagagaagcaaggagaaagagaagggttagaaggcgaagaagcatggcttcactcaagaagaagaaaccctattacccgcttccgttaattcctatctattactacttcttattcaaagggtgatatgatcttcttcttccaagagtctcatgcatgctactttcttctctcttctcggggaattgaagcgttgtggtccgattgtttgctagatcaagcaaattaacctgtatactggtttatatatcttcaccttgcacctttctctctctctctctatctctctctctctatatatatatatgggtttaatctcttactttctttatcttttcactttttttcagttttggtttgatttaattacgtgattaaa

SEQ ID NO: 29979 - DNA, 401 bp, Glycine max
ggtagagaaagagagagaaagatgtcgaagcgtggtcgtggtggttcggcggggaacaagttccgcatgtcgctgggtcttccagtggcggcgacggtgaactgcgccgacaacacgggggcgaagaacctctacatcatttcggtgaaagggatcaaaggccgtttgaaccgtcttccctcggcctgcgttggcgacatggtggtggccaccgtgaagaagggaaaacctgatctgaggaagaaggtcttgccagctgtcatcgttcgccagcgcaagccatggcgccgaaaggacggcgtctacatgtacttcgaagataatgctggtgttattgtcaatcccaagggagaaatgaaaggttctgctatcactggtcccattggaaaagagtgtgctga

SEQ ID NO: 29980 - DNA, 351 bp, Glycine max
ggcttcgaaagagagagaaagatgacgaggcgtgggcatggtgactcggcggagagacaagttccgcatgtcgctgggtcttccagtggcggcaactgagaactgcccagaaaacacttgggctaagaacctctacatcatatctgtgaaacggatcataggccatcttaatcgtctaaccttggcctgcgttggtcatatggtgtgtgtcctccgtgaacaaggtacaacctcgatccgatgatgatcgtcttgccagctgtcatactttctccgcgcatgtcatggcacacaatggaccgcgtgttcatgtactttgactataatgctgtagatattgccaatcccata

SEQ ID NO: 29981 - DNA, 403 bp, Glycine max
gacagcgaaacagagagtgatttcagtgagtgatcggtgttcacttgatctcatcataatcgtcagcgtcaattgaagaagatgccgatcagaaacatcgccgtcggaaggcctgaagaggcgactcaccccgacacgttgaaggcggctttggctgagttcatctcaaccttcatcttcgtgttcgccggctcaggctccggcatcgcctacaacaagctcaccgacaacggcgctgccacccctgccggcctcatctgcgcctccatcgtccatgcattcgccctcttcgtcgccgtctccgtcggcgccaacatctccggcggccacgtcaaccccgacgtcaccttcggcgccttcgtcggcggcaacatcaccttacttcgcggcatcgtctacgtca

SEQ ID NO: 29982 - DNA, 432 bp, Glycine max
ggtgttaagaaatttaagtgaggagctagagaatgatgatgaagtctgctatgtgtgcagtggtggttgtagcacttcttcttctggcggaggtggggcccatggctgaggctgtgacatgcaccccaacagagttgagtccgtgtcttccagcaatcacttccggtgctaaaccttccaatgcttgttgcacgaagctgaagcagcaaaaaccatgcttatgtggctacctcaaaaacgctagcttgaagcagtatgttaactctcctaatgcccgaaaaaccgttgcttcttgtgggattccctttccaacttgttaattaattaagccttcttataattaaagtgtgggatatatatatatatataaattaaacttatatttattatttactctatatatgtcactctacggttgtgtgatatattata

SEQ ID NO: 29983 - DNA, 157 bp, Glycine max
cgagcaagctgcattctacagataatgcctgccactggggattgagatcatctgaagatgaactcaacaggtttatatatagaactctataccgcttacctactcagatcaagcctatatcttaaggaaatctgatcctccaaccaaatgcactggt

SEQ ID NO: 29984 - DNA, 407 bp, Glycine max
  modified_base (380)..(380): a, c, g, t, unknown, or other
gggggtgatgatgatgaccactattttagtaactcttgttatgcttcttatatggcagatacacatcattgtagtgctgagttttgctgtagtcttcctgggattggagttgactttcttttcatcagttctgtggagtgtaacggatggaagttggattatattggtctttgctgtaataatgttttttataatgtttgtatggaattatgggagtaagctcaagtatgaaactgaagtaaagcaaaagctgtcaatggatttgatgcgagaattaggctgcaatcttgggacaatacgagctcctgggattggtttgctctataatgagttggtcaaaggaattccaggcatttttgggcattttctaaccacacttncagcagtacactctatgatcatatttg

SEQ ID NO: 29985 - DNA, 422 bp, Glycine max
ggtagatagagaagctagagagaagagacaagaaagggatgctgatttagaacgagataggtctgataagcatagcaaatgtcttgacaaggaatcaaacgatgggtgtgctgatggagaagggatgatggagaaggagagggaggtctataattatagcagtcagcaccgtaagaggatacaacgatctagagggagccctcaggtgcctaaccgggagcctcgtttcagatcccgtgcccaagataatgatgggtctcaaggtaaagtagaagtttcttctgatggtataaagttggcgaaagcatgcaagaactgataaagttgtggaaggaatatgaatcatctcaatctcaaatggaaaaaaacggtgaaagctctaataatggtcccactctggaaattcgtataccatctgagca

SEQ ID NO: 29986 - DNA, 343 bp, Glycine max
gatacaaaaccctgaagaaagacacagccattgtttgtttactttccattgattgagcgaaagctttgttttttctgcgatcattttccattgggtggaagaaagtctcaacctttagtcgaaagagcaaggatctgagtgagtgagcgatcatgtgtggtggtgcgattatctccgacttcattccagcgggtcccgccggcggggcgcagcgcgtgaccgccgacatcctgtggccgaatttgaggaagcggttctcgaagtcgctgctggacgatgatttcgaggcagggttcagagaattcgaggatgactcggaaatcgaggatgtcgatgatgaaga

SEQ ID NO: 29987 - DNA, 413 bp, Glycine max
gagctgaaatcgagaagaagaagaagaagaggatggagaagtatcagatctggagcaggagaatagcgttggcagcgtttgcgtttgctctgctgttccaatcggcctcagcagacgacgtcgttgtgctctctgaagataacttcgagaaggaagttggtcaggacagaggagctctcgttgagttctatgctccttggtgtggacactgcaaaaagcttgctccagaatatgaaaagcttggtagcagcttcaagaaagccaaatctgttttaattggcaaggttgactgtgatgagcataagagtttgtgcagcaagtatggagtctctgggtacccaacaattcagtggtttccaaaaggatctcttgaagccaaaaagtatgaagggccacgcactgctgaatcactt

SEQ ID NO: 29988 - DNA, 335 bp, Glycine max
cgcctcccttcggatggtcgacgacgacggatagtggttacgagagattattattataacgtgattcgggaatgttgctgcaatagagcgggagacagaattcatagaacctcgcaaacaatgggctctgacaagtaacaccggatcgggattagtgatatccagaactgacccgattctggattccctttccgacacatcaaatgacgctactctgttctacgaacttcaacgaacatagtccgagctgctcctccaggcagagatacactacgtgccatttcaaactgtgtggatggcctctaacccatcatccaaacccgacttgacccgac

SEQ ID NO: 29989 - DNA, 400 bp, Glycine max
ggaagctaaagtcaacaacacatagcagaggatagatagtttgttcgttgcgttgccatgtcggcgtcggagattgttcgggaactggattcgctgaaggacgaaaagaccataattgagcagaaaatctctgcgcttgaagctcaactcagagagattaatctccaaaacgacgccgcaccacccaacggattgacgcaggacatgattcacagatacagtcgccaccttgtgcttgcttcctttggtgttcaagggcaggcaaatctgttgaagtcttcaattttagttgtgggagctggagggttgggtgctcctgcattgttatactttgcagcttctggtgttgggcgcttgggagttattgatcatgacgtggatgagctgaataatatgcacc

SEQ ID NO: 29990 - DNA, 407 bp, Glycine max
gatagtagcagtgcttagtggcgcagaaaaataaacctaatttaccaaattcagacacagattctcattcctcaagatcttcttcttatttcttgtctcaaattaatcctcaaactttcctctctgtgtctctctaacaatgtgctccatttcctcactccaccaaaatcatgtctaaggatattgctaacatgaaggactcttggtttttcgacaataactttaatggtctctcagacgagatttttgatgatgtcattaacttttttgatttcccgctggaagacgtggaagctaatggcgtcgaagaagactgggatgctcaattaaaatgccttgaagacccgcgtgttgatggttatacagcatcatcagctgggttgtgtgccaaaactcaaaatgaaaag

SEQ ID NO: 29991 - DNA, 381 bp, Glycine max
gggcaagctgcggactacaaataatgccggccggtgtggtttgtgttcatctgaggatgaacttaacagtgttatatatagtttacaataccgcatacagcatgagagcattcctttgactgaggaaaaacaaatcctccgagaaatcaaacagcttgaggggacaagggagaaagttattgctaatgctgcaatgagggccaaattacaggaatctatggggcaaaaagaagccattcaagatcaggttaagcttattggtggggatttggatggagtgaagaaagagagagaagcaattcggtccaaaatcaagcaaattgatgatgcactgaaagccatagacaaggatatccagtctctacaggaagaactgacagc

SEQ ID NO: 29992 - DNA, 418 bp, Glycine max
  modified_base (382)..(382): a, c, g, t, unknown, or other
ggttctagtgtgtgattgtttgttgttgtaactcgttcttcttcttttgttgttctgtgtttgtgtttgttttttctctcacctgaaaatgtcttgctgcggtggtaactgtggttgcggaagctcctgcaagtgcggcaacggctgcggaggctgcaagatgtacccagacttgagctacactgagtcaaccaccaccgagaccttggtcatgggagtggcacctgttaaggctcaatttgagggtgctgaaatgggtgtgcccgctgagaacgatggctgcaaatgtggaccaaactgctcctgcaacccctgcacttgcaagtgaagtgttgggagagcaagcttcaagcagagatagcccttaattaagaataatgantaactattaatgtgtagctaaaaacttaatgattat

SEQ ID NO: 29993 - DNA, 352 bp, Glycine max
taagagggggctcacaatatatcagactatattgttgcactacttggcttcaaccaaggtcttattagaatgcaagatgatggagaaggaaagagaagatgagatagaggacatgtcaatgtcacctccatctattggctccatgcagattgcaaggagcaatggcttcggtcacagcatggaggttatgtctcaggcataccttacaaatatgtacacagagattggcataaaagttcaagagtgaagctgcaaccaagatcccgccctgccgatttatctcatgtttgaagatgtagagttcagggtaatagatagcccatcggcttccaataaccctgtgaagacaatg

SEQ ID NO: 29994 - DNA, 377 bp, Glycine max
ggtaacaagagattattattatcttgtgattcgtgaatggtgctgcagtagtgcgggagacagagcacagagaaccaagcaaacaatgggtactgacaagtcaaaccgggtcgggttagtgatatccagaactgacccgattcgggatttcctttccgacgcatcaaaagacgcgactctctccgacgaacttcaacgaacatcctccgatctgctcctccagtcggagataccctacgtgccatttcgcactgtgtggatggcctctgacccatcaaccagacccgacttgacccgactcttttcgggcacccgcttcatcttctccagccctaagcccagggaaaagagtgaagaattgaaagcgaagctgaaaa

SEQ ID NO: 29995 - DNA, 375 bp, Glycine max
ggagcaagagtgaacagcgaagagaatggctcccaagggtttaatctttttggctgtgttatgcttctcagcactgtcactgagtcgttgtcttgcggaggataatggacttgttatgaacttctacaaggaatcatgccctcaggctgaagacatcatcacagaacaagtcaagcttctctacaagcgccacaagaacactgctttctcctggctcagaaacatcttccatgactgtgctgttcagagttgtgatgcttcactgttgctggactccacaagaaggagcttgtctgagaaggaaacagatagaagctttgggttgagaaatttcaggtacattgagaccatcaaagaagctttggaaagggaatg

SEQ ID NO: 29996 - DNA, 232 bp, Glycine max
acacagactatgaaaaagggagaatgaacagcgggtagcatcttttttctgaatcagctcttttttataccctcagttagctctcatagagctattgactctttcagcagcttactaattaacactcattacattcgacgtgtttggctgcttcactcggttgctgtatgtcattctcactaaaaagctccatctcatctcacattcacttaatttctggtaggattatcgc

SEQ ID NO: 29997 - DNA, 363 bp, Glycine max
aacatgattgagaggtccacaaaccttgactggtacaagggtcctactctgctagatgcacttgaccagatctctgagcccaagaggccttctgacaagcccctcaggctaccccttcaggatgtgtacaagattggaggaattggaactgtgcctgtgggacgggttgagactggtgtcttgaagcctggaatggtggtgacttttgcaccaactggactgacaaccgaagttaagtctgtggaaatgcaccatgaagctctcacagaggctcttcccggtgataatgttggattcaatgttaagaatgctgctgttaaagatctcaagcgtggttatgttgcctcgaactcaaaggatgat

SEQ ID NO: 29998 - DNA, 413 bp, Glycine max
ggagggagagaggatccaaatccaagtacggttgggttggagagaaaatgcgtccctgctgaaaacaccaaaccctaaaacgcgaaaagggttctaagaatttgcgaaggaaagagctagcggagatggagattcactacagtaacagctatttcgagaggcgccccatcctcaagtccaaggctgccgctgtcaaatgggtcaaagaatgggttccccaagatcttgtgacaacaggagggaagtgcatgatcttaaaatgggtaacagaggataccttgaagaccttgaaagaaaaggtaaaagagccttcagtgccagagccagaacctgagccaactactgaagtactttttctttgcagctatgatggctgtggaaagacattcatagatgctggtgcattgaggaaa

SEQ ID NO: 29999 - DNA, 274 bp, Glycine max
ggagcaagagtgaagagcgaagagaatggctcccaagggtttaatctttttggctgtgttatgcttctcagcactgtcactgagtcgttgtcttgcggaggataatggacttgttatgaacttctacaaggaatcatgccctcaggctgaagacatcatcaaagaacaagtcaagcttctctacaagcgccacaagaacactgctttctcctggctcagaaacatcttccatgactgtgctgttcagagttgtgatgcttcactgtttgtggac

SEQ ID NO: 30000 - DNA, 282 bp, Glycine max
gggcggatgcaagcagacaacagacaggggagacggaagggagtaccttctctggcttcttcctgagtcataagccagagcaggccaacgccattcatatcgatgcgaggctgtctataacaacagagcacaacgtctcatatcggcggcataaatcacatacttaacaccgcactacacataaagagagggcacctatgagctggtgtagaggactagctacaaaatagaccctgttgtggtgcctgctgatatatgagatgcaagatcctgacattattg

SEQ ID NO: 30001 - DNA, 374 bp, Glycine max
gataacaaaacagaacaaatattatcaaaaggggcagactttgaaaccaaaatcagattttattttttatttttttgctgaatctgaatagatcagaaggtgatgtcgtgttcgtcgtcatctgggtcggaggaagacgatgagggattcgactcttaccggaaaggaggctaccacgccgtcagagtcgccgatcagttcgccgccggcaggtacatagcgcagagaaagttgggttggggtcagttttccaccgtgtggctcgcttacgatactaaaactgagtcatatgttgctctcaagatccaaaaaagttcggcccaaattgctcaggctgcccttcatgagatcaatcttctttcatccattgctga

SEQ ID NO: 30002 - DNA, 322 bp, Glycine max
ggaggtagcttagaaaatcgttgtcggtgtccactaatggttgtgaaggctgtatgtgatgacattggagctgacaaagttggtgttaggctatcccctttcgccaattattgtaattgtgtagactctaatcctcaagcgttaggcatttacatggcacaatccttgagccaattgggcattctttattgccatgtcattgagcccaggatgctcacaatgtttgaaaaacatgagacagacgtgtcccttttgcctattcgaaaggccttcaacggaacatttattgttgctggtggctacaacaggagtgagggaaaca

SEQ ID NO: 30003 - DNA, 325 bp, Glycine max
gatagcgaagacagagagtggtttcagtgagtgatcggtgttcacttgatccttcataagtcgtcatcatcatcatcatcatcaccgttgattgaagaagatgccgatcagaaacatcgccatcggaaggcctgaagaggctactcaccccgacacgttgaaggcggggttggctgagttcatctccaccttgatcttcgtgttcgccggttcaggttccggcatcgcctacaacaagctcaccgacaacggcgccgccactcccgacggcctcatcttcgcttccaatcgccatgctttcgccctcttcgtcggcgtctccgtc

SEQ ID NO: 30004 - DNA, 385 bp, Glycine max
ggcacaaaaatacaatacaaaacaaaacagagcaaagagagagtgtgtgaaaagtgaaacaaaaaacagaacaacaatggcgacacttaaggttcctcagcctcttccccccgttgcagatgattgtgagcagctccgaaaagccttctcaggttggggaactaacgaggagctgattgtatcgatcttggctcataggaatgctgctcagaggaagcttatcagagaaacttatgcccagacctatagagaagatctcctcaaggccttggacaaagaactcacgagtgattttgagaggctggttcatctttggacacttgattctgctgaacgtgatgcatttttggcaaacgaggcgactaaaaaatggacttcaagcaat

SEQ ID NO: 30005 - DNA, 423 bp, Glycine max
ggaacacaactgtgttgtagttgttgttgttgatgtttgctttgttctctttctctctctctctagggtttcaagagtgttttgaactactccagaaccctctcttgtttttcacaaatttgggttcagtagagtactgacccagaaaagaagattcaacaggtacctaagagaaggaaagagggggatagaaagaaagaaaaagaaatagaaactgcacgtataaaagaagaaagaaagaatcaaagaaaataggaaaaagggcaaatattttgtttgaataagatataaggcaatagtaatattagtattgttgataataattaggtagaaaaaatattatggggaggggaagagtggaactgaaaaggatagagaacaagataaacaggcaggtaacgtttgcaaagaggagaaatgggc

SEQ ID NO: 30006 - DNA, 251 bp, Glycine max
caagagaatggctcgcgcgggcttaatcttttttgctgtgttattcctttaacacacccacttctgcaatttgcattgttcatagtatgaattgttatgaacttctacaaggaatcatgccctcaggctgaagacatcatcaaagaacaagttaagcttctctacaaacgccacaagaacactgctttctcctgactcaaacacatcttccataaatgtactagccaaacacaaggctcaccactattgct

SEQ ID NO: 30007 - DNA, 149 bp, Glycine max
ggactgggatggcggatgcgtggggaatggtgcggcggcgcgcctatggttttgcgcggttcatatgggaagacacgctctacacacaccaaggtcttccttatgctggtacgcatgtcgaccaatcgaggaccttattctatgactgg

SEQ ID NO: 30008 - DNA, 155 bp, Glycine max
gcccacgcgaacgtcctgataatacaacacaacggagttcacttctatgttccaaacttacaccaagagctcggctataatactaacatcgctttctctaaacaaacaagagctaattcaactactccataaccctcttttttttttcacatatt

SEQ ID NO: 30009 - DNA, 415 bp, Glycine max
  modified_base (97)..(97): a, c, g, t, unknown, or other
gggcaacaaacaggcttctgaccgtggttcaccctattaacaaacttctgtttcctcactatcgtgacaccatgaacattaattcacttgcccgcanatccttggtcaatgccgacggtattatagagaaaacattcttgtggggtaggtactctttggaaatgtctgctgttatttacaaggattgggttttcaccgatcaagcattgcctaatgatcttgtcaagagaggagttgctgttaaggatccatctgctccccatggagttcgacttttgatcgaggactatccttatgcttctgatgggctagagatatgggatgctatcaagtcttgggtggaagaatatgtctcattctactacaagtcaaatgaggaacttcaaaaagaccccgaactccaagcttggtggaa

SEQ ID NO: 30010 - DNA, 390 bp, Glycine max
gattgcaggcataagtcattttagtccgtgacttttcgaaacccctcatctagttcgtgactttgtaaaaagttattcattagatgattaatctagttcgtgacacaatggaaagtaagtttgactttgcaaaaacttattcaccaactaattagaaccctcatctagtttttgcgaccatgtaaaaaagttagggactaaatacctgacgcttttaataccatagactaatttgctattttctggaccactaatctccatttatttttatttggttaaaatatgtttagttctttaaaaatatcttgaaattcagttgtagtcttttgatagataccaactggtaagggaataaggactgaattttattcaaagaaacagaacagaaat

SEQ ID NO: 30011 - DNA, 395 bp, Glycine max
ggaagaagaaaggtcatggggaattcagggaagtaaccgagggtgatttcttaggtgaagtcactggaagtgaaaaagtgatttgtcacttctaccatagggagttctatagatgcaagataatggataagcatttaaagtctcttgcaccaatgcatattgatacgaagttcatcaagcttgatgcagagaatgcaccattctttgttacaaaactggctatcaagactttgccttgtgtcttgttgttcagacaaggagtagcagtagatagattggtaggatttcaagatgtgggaggtaaagatgattttaccacaagaacgctggaagctcttctgataaagaaaggtataattgaggagaagaaagctgaggatgatgaagatgatgaa

SEQ ID NO: 30012 - DNA, 420 bp, Glycine max
  modified_base (19)..(19): a, c, g, t, unknown, or other
  modified_base (52)..(53): a, c, g, t, unknown, or other
  modified_base (62)..(63): a, c, g, t, unknown, or other
  modified_base (124)..(124): a, c, g, t, unknown, or other
  modified_base (127)..(128): a, c, g, t, unknown, or other
  modified_base (145)..(147): a, c, g, t, unknown, or other
  modified_base (159)..(160): a, c, g, t, unknown, or other
  modified_base (169)..(170): a, c, g, t, unknown, or other
  modified_base (186)..(187): a, c, g, t, unknown, or other
  modified_base (197)..(199): a, c, g, t, unknown, or other
  modified_base (212)..(213): a, c, g, t, unknown, or other
  modified_base (236)..(237): a, c, g, t, unknown, or other
  modified_base (244)..(245): a, c, g, t, unknown, or other
  modified_base (254)..(255): a, c, g, t, unknown, or other
  modified_base (263)..(264): a, c, g, t, unknown, or other
  modified_base (272)..(274): a, c, g, t, unknown, or other
  modified_base (295)..(295): a, c, g, t, unknown, or other
  modified_base (318)..(318): a, c, g, t, unknown, or other
  modified_base (339)..(340): a, c, g, t, unknown, or other
  modified_base (348)..(349): a, c, g, t, unknown, or other
  modified_base (356)..(357): a, c, g, t, unknown, or other
  modified_base (379)..(379): a, c, g, t, unknown, or other
  modified_base (381)..(382): a, c, g, t, unknown, or other
gggttctataatcatgagnaacaaatctcttggtggtatggagtaccatgcnncaaatggannagtttaggtgagggttcttttcatggcaagaaaagggggggccacttttgcattggtacancannaggtataagaattgctnnngtggaggctttnncaaagggcnnctttgcttattctacnnaccatgactnnngttcaccacttcnnattgtccattagagaaatgttannaatccannacaacatcnncttcttgnnattccaannntttgaagcacaaaatgttgcnttgatttttgggctttcgctaanaattcctgcaagaaattctgnngagcatcnntgaatgnncatgtctgctattttgctggtntnncttacggataaccatagctttcagagtattgccctaca

SEQ ID NO: 30013 - DNA, 369 bp, Glycine max
ggggattggttttggattaagctgtagagttgctgcacttgatccaaacttcaagaagctctcaatggagcacatagtttcagcttacaagcggacggcaactagagcaatccttgttgactatgatggtacactaatgcctcaatcattcaccattgataagagttcaagcagtaaatccattgaaattcttagtagtttgtgtagagataagaacaacatggttttccttgttagtgctagaagccgaaagatgctttccgaatggttctctccttgtgagaatctgggagtcgcaactgagcatgggtactttctaagaatgaaacgagatgaagagtgggaaacacatgttgcagcagcagacac

SEQ ID NO: 30014 - DNA, 343 bp, Glycine max
ggaacacaactgtgttgtagtcgttgacggtgaggtttgctttgttctctttctctctctctctagggtttcaagagtgttttgaactactccagaaccctctcttgtttttcacaaatttgggttcagcagagtactgacccacaaaagaagattcaacaggtacctaagagaaggaaagagggggatagaaagaaagaaaaagaaatagaaactgcacgtataaaagaagaaagaaagaatcaaagaaaatacgaaaaagggccaatattttgtttgaatcagatatacggcagtagccatattagtattggtgataataattacgtagaaaaaatattat

SEQ ID NO: 30015 - DNA, 370 bp, Glycine max
ggagccaaggcccagacagacaccgcatgctcttctctctcactaccattgatttccccgcacgttcctctcctaattcccctcctttttcgctactctttttcttttggggtgaaaactgaaaactagaaagaagcgtacggagagaaccaaagaaaacgaatccaatgggaggatgtgcaactaagccgaaggtctcccaggacgatcccgatggaaagcccaaggcaccccaaccagaaccagaacctgaacctgaacaccaacaacccaacaacaaagacaccctgcaaaccaaagtaccccaagtggaacaaggtgctgctcacaaagaccacaacaaccttaatgtcaacgaaattgttgacga

SEQ ID NO: 30016 - DNA, 419 bp, Glycine max
gaatttaatttgattttgcagcgacgagaccacagtccacaagacccagaagcaccaccgcgaccggcgaatccagccaccgtgtgcggcttcgaattgagtccgagaacgcagttagacaggctttatattgaaacttgagacttgaagggaagctgttataattggtcagtcttcccatggcgtatcccttctcagatttcaagtactcagatggcctcactgtagtgggtatctccttctgcacagctattgtctgtgaggctatctcatgggttcttatctatcggaccaattcttacaaaaaccttaggtcctccattgacaaagcctccaagaaactcgagaccatgaagacagacagcaatgaaatcaacatcaagaagttcaagaccaaaaaaattgaccgtgttgagaca

SEQ ID NO: 30017 - DNA, 305 bp, Glycine max
ggattgtgatggcggatgaagggggaattgagaagcggcgctacgatgtttttctgcgttttagaggggaagacacgcgctacaccttcacaggtaatctctatgctgctttgcggcaggcgagattgaggaccttcttcgatgatgggttcaagagtggcgaccaaatctttgacgttgttcttcaagcaattcaggaatcaaggatttcaatcggtgttctctacgaaaacttcgcttcttactcgtggtgccttgaagaacttgtgaagatccttgagtgcaaggaaacaaagaagcaactc

SEQ ID NO: 30018 - DNA, 260 bp, Glycine max
ggatggattgactgggcatggaaaagatgggcgggaaggggtcctctgtctgtccgccttcataccccaaaccgaccatctcagctcgttcatttctctctctactcgctatctgactgactacatgatgaactttttgacatgacgttcacacacgcatgccacaaacttctgatttctcttaatttcacaagaaagagttaatgtcccgtggattgtttatgtggacaatgacttcttgactttcaatgctcgcaaaa

SEQ ID NO: 30019 - DNA, 363 bp, Glycine max
  modified_base (313)..(313): a, c, g, t, unknown, or other
ggaggcaaagtggaggaggaggctcacgattcaaaggaatgatcgtgaagttgtcggttgctgctgtggtgctcttgatctgcacgctctcattgttcttctcctcaacaggaacttcttccaatcttcaatccaactatcgctccgagatccgtttagaagagctttggagcaacgcaggttccggtggttggcggccgtcgtctgctccgagaactcattgggcccctccttcgactgagagcaacggctatttgcgtgttcgatgtaatggtggcctgaatcagcagcgtagtgcgatctctaatgctgntcttgctgcgcgaatcatgaatgctacacttgtgctacctgagttggatg

SEQ ID NO: 30020 - DNA, 345 bp, Glycine max
gggagacttaaatgaaaaggaaataatcttaagtggaaccttctgcgaaattagccttccttcgtcccttgattgaagtataaattaggggtgttgaaattcaaagccatatccgtcattaaccaaatttgtgtttctccgattgcaagcaatggactccttcaattccttcttcgattcaacaaaccgatggaattacgatactctcaaaaacttccgtcaaatttctccggtcgttcagaatcacctcaagcaggtttattttactctgtgtttcgccgtggttgctgcggctgttggggcttaccttcatgtcctcttgaacatttggggttttcttactac

SEQ ID NO: 30021 - DNA, 393 bp, Glycine max
caaacaggctttggaccgtggttaaccctattaacaaacttctgtttcctaactatcgggacaccatgaacattaattcacttgcccgcaaatccttggtcaatgccgacggtattatagagaaaacattcttgtggggtaggtactctttggaaatgtctgctgttatttacaaggattgggttttcaccgatcaagcattgcctaatgatcttgtcaagagaggagttgctgttaaggatccatctgctccccatggagttcgacttttgatcgaggactatccttatgcttctgatgggctagagatatgggatgctatcaagtcttgggtggaagaatatgtctcatcctactacaagtcagatgaggaacttcaaaaagaccccgaac

SEQ ID NO: 30022 - DNA, 144 bp, Glycine max
ccggaccggaggggccggctcgacccacccgtcgcgttctagaagaccccagctgcgggacgacatcagtgttggagcatcaaacgagacccgtacggtgcgccagaaatgtttccgtcttcgaaaaaagggggcttttgtgat

SEQ ID NO: 30023 - DNA, 406 bp, Glycine max
ggtacaggtgagtttgttgatcgagataactaggaacagggtgatgaaaatgaaggtccttgtattgttcgttgctacaattttggtagcatggcaatgccatgcgtacaatatgttacctctccgaatgaacactgtctatggtgtccgtactacggaggtgaaatgcacaagttggacgcttgctgtggaaacacacaacatctttggctttgagaccattcctgaagagtgcgttgaagcaacaaacgaatacatccatggcgaacaatatagatcagactgcaaaacagttaaccaacaagcttacttttatgccacagacctcgaagtgcattccaaggacacatttgtgttcaaaataagacgcaccgtactctctaatattgcatactacaaaaaacat

SEQ ID NO: 30024 - DNA, 402 bp, Glycine max
ggaatggggcgacgagaaatgagatagaaaggggaagtggcactggcgaatgagaatgagtgtagaaaagaaagtccatggccatgagtgtgggcgtggcattgccatccaccaccaccagtctcagtttccttcgctaccgctctcgctctccaattcaaaataaaatccgttttccccgtcaaattgtttctaaattaaacagtgcagaggtccaggttcaaacctggtaattttgctttctgaatcacgtaattttatttttatttttctgttttttgaaacagtcttcaggccttgtattgtagcgtgtgggattggaggggttactctattcgctatcaacattctggaaatattggccctgcactagttttagtccacggtttttgagctaacagt

SEQ ID NO: 30025 - DNA, 331 bp, Glycine max
ggagaaaaggaaagcatacattcacatttcacacacacacacatactactctctctctctctctctctctgatggattcgagggagtaaaagcaagaaagcaagcatttggatttggattgagatccgcaatggcaccgaacaacaacagaaccaagggatcccatttccctcttctcgctttcctctttctctgcctcctcgcgccccttctcttcttcttcttcgcatcgccccttcacgatcgaagtgataattcagctgtttcgattgaaaaggttgccaaattgaaagaatggcaggcactgcaggatcttaaatcgcttttttcg

SEQ ID NO: 30026 - DNA, 416 bp, Glycine max
ggggatgtgaagctacttcaccactccaaacccaccacaccaccattattcatatctcattctctaacctttcactctgccttactcactctctactttgctcatcatcgtagatgaaccaacacttctagtctctcttactttataaccatgtaaaaatgagtcacctaatgaaaaattagtagcttcttgttgtgctttttattttgtttgtgttgagataaatttgtttgtttgtttggtattgttttgtgttttatgaattatttgatgggtgaagaaggagaagtggtgagaaagtaaggacaaaggggtgttggtggagataagtggtacttgtatagctgcttacaagactggaaatattggtgctggttaatacacgagactagttctctttcgatggtcccttttga

SEQ ID NO: 30027 - DNA, 147 bp, Glycine max
ggggtgcatcatgggaggaggacctgccgacgctaatttttccgtcttagaaggacgcctcttcttatgatggaataattattatcttcttctcctttttttatctggtgtagttgagggccttttttgttactataacaccgtaat

SEQ ID NO: 30028 - DNA, 256 bp, Glycine max
gaccaacacaaacaatagtgcatagcgtttttcattgtgcattattcaatggccaccacagcagctctatccggaaccatggtgagcacctccttcatgaggaagcaacctatgacgaccaagagcctaaagacattccccaacgctctttttggtctgaaaggtggacgaggtggtcgtgtaacttgcatggcctcgtacaaggtgaagctcataaccccagaaggagaagtggagtttgaatgcccagatgatg

SEQ ID NO: 30029 - DNA, 406 bp, Glycine max
ggcacaagtgagtttgttgatcgagataactagaaacagtgtgatgaaaatgaaggtccttgttttcttcgttgctacaattttggtagcatggcaatgccatgcgtacgatatgttccctctccgaatgaacactggctatggtgcccgtactccggaggtgaaatgcgcaagttggaggcttgctgtggaagcacacaacatctttggctttgagaccattcctgaagagtgcgttgaagcaacaaaggaatacatccatggcgaacaatatagatcagactccaaaacagttaaccaacaagcttacttttatgccatagacctcgaagtccatcctcaggacacatatgtgttcagtatagatggcaccgtactctctaatatttcatactacaaaaacatg

SEQ ID NO: 30030 - DNA, 335 bp, Glycine max
ggatgtaaaaaatgttatgccttcttgtgtgaggagaacagcatactacataggttcgaaatacacaacaacttcacagaagtgagcaaaacagcttcatgttttatgccccaccacctcgtgactgtgtgattaacttgaggttctcataagcctcagcacaggcatgagcatagtctgacaatgcacggaagagttcaggcaagcgagttatgagactctgcagtgatttctctcgcacctgaatgcaatgtttttggtgggattcaatttcctgttctaatctcttctgcaagctctcaacaacaaactgcctctccgagacaggattattt

SEQ ID NO: 30031 - DNA, 419 bp, Glycine max
  modified_base (377)..(377): a, c, g, t, unknown, or other
gatagtgaggttgaagatgatgatgatgatactggaaaggataacatgcctgtggctaaaaagaagggttggttttcctcgatgttccagagtattgcaggaaaggctaatttggagaagtcagacctggaaccagctttgaaagctctgaaggacaggctcatgaccaagaatgtggccgaggaaatagctgagaaactatgtgagtcagtggcagcaagtcttgaaggcaaaaagctagcttcgtttacaaggatatcttcaacagtgcatacagcaatggaagaagcacttgttcgtattttaacccccaggcgttccattgacatattgagggatgttcatgctgccaaggagcaaaggaagccatatgttgntgtgtttggtggagttaatggagttggaaaatctactaatct

SEQ ID NO: 30032 - DNA, 335 bp, Glycine max
gatagaaaggggagggacatatttgacaggtcagcaaccgcgttcttttctacggagcctcgaccaagaagaatcgcagtgagaagaagagggggtcagagtgagaaagagaaagagagaattcgtaaaccctaatttcggaaagatcggcgatgactgcctccaaggatcgcgagaacttcgtctacatcgccaaactcgccgagcaggccgagcgttacgaagagatggtggaatcaatgaagaacgttgcgaatctcgacgttgaactgacggtggaggagcggaatttgctttctgttgggtacaagaatgtgattggtgctcgcagagcg

SEQ ID NO: 30033 - DNA, 417 bp, Glycine max
ggttctagtgtgtgattgtttgttgttggaactcgttcttcttcttttgttggtctgcgtttgtgtttgttttttctctcacctgaaaatgtcttgctgcggcggtaactgtggttgcggaagctcctgcaagtgcggcaacggctgcggaggctgcaagatgtacccagacttgagctacactgagtcaaccaccaccgagaccttggtcatgggagtggcacctgttaaggctcaatttgagggtgctgaaatgggtgtgcccgctgagaacgatggctgcaaatgtggaccaaactgctcctgcaacccctgcacttgcaagtgaggtgttgggagagcaagcttcaagcagagatagcccttaataggaataatgataaactattaatgcgtagctcaaaacttatgtattat

SEQ ID NO: 30034 - DNA, 414 bp, Glycine max
gagggaagcacaaccaagcttctctgttaaaaaaaaattaggcgtctaaagggccaaagcttagaaagttgaagctttttttgttgaggtgaaagtgaaatggttggcaaggataatctgagggctgaggacttgaacttgtgctttaagaagcttatgatggtggccgggagtgggaacagtgagaaaggggtgaacttgaaggttggggtgatcaccgagtggaaggatattcctgtggagcttctgatgcaaattctgtcccttgtggatgatcagacggtgatcatagcttctggagtttgtcgtggatggagagatgctatttactttggccttgctcgtttatcactctcatggtgtagcaagaacatgaataacttggtcctatctcttgttcctaaattcgcaaaa

SEQ ID NO: 30035 - DNA, 411 bp, Glycine max
gggtggagagcaagagctataagtgtgagaagtgattggaagttgttggaacccaccctatcaacaaggagaagctgttttcgttcgtcgccactaacactaatcgtttcttcaatgccttacgagaaggaactcgccgctgcaaagaaagcagtcactctcgctgctcgtctctgccagaaggttcagaaggctcttctgcaatccgatgtgcactcaaagtcagacaaaagtcctgtcacagtggctgattatggttcacaagcattggtcagctttatacttgagagagaacttccttctgaatcattttcattagtagctgaggaggattcaagtgatcttcgtaaggaaagtggccaggatactctgaatcgcattacagaacttgtcaatgatactcttgctagt

SEQ ID NO: 30036 - DNA, 398 bp, Glycine max
ggtggctggctgtagtagtgctttgctgtccgagagtaaagagtaagcctctttctcactctctaatctatttgtgaactaggttttggttgcagagacatgggagaaaggattccgtgtgggagtggcatgtatttccccttccctcctccgccatctcccattcgcccttcttcttcttcttcagatcgcgataggtatttggccgaactactcgctgagaggcaaaagttggtaccctttctccaagttcttccacaatctaccaaactcctaacccaagaaatcagacgcatgtccgttggtggcggcggcggcggcggcggctttaatcatgagcctgcagcagacactcctcctccatattttaggcctatggatctcgagggatgggcaat

SEQ ID NO: 30037 - DNA, 397 bp, Glycine max
  modified_base (349)..(349): a, c, g, t, unknown, or other
ggacataatgatgatgtttgatcaaaggacatagctttagtagcagtggcagtagagacatgtacagaggatcgtctgcttgctgtctcttctttcccctccttttcgtgtgtgagagagttcagtgttattctctgttctaacttcactttttggcaccatttatcatgcttcactccttcttcttcttcttcttcaccctccaacaggccaagaaagatagctcttttctacgggtatatatatatatatactcttggacactttttgtttgagtttggagacaatgattgtgtgttgacgctcttccttcggtttcaattcacttctccaacatctactacatatngcagggctctttaggatgggacaagaattggagtttgatctgaatgac

SEQ ID NO: 30038 - DNA, 321 bp, Glycine max
aggatgacgaagacgacacatggatgacgtatgcacgatgaagataatggacgagcggacagggggttcatgtctgagaagatagaaaggctttaggaatggttgcacacgatagcccgttgatatatgagggctgcactgcacagagagaatctcgtgatcaatatacgctggactcgctcgtaacttcgctagagcctatataacctgtatatgtatgcctgtcctcatttacaagggcgtcgtgctggcatctcgtttgcaagatgaagataatggtcggccgtacaggaggttcatgtgtaaaagattcgagagtct

SEQ ID NO: 30039 - DNA, 345 bp, Glycine max
gacggctaaaagctaaagatcatcgaagtactcgaatgagcatggctgtcacggttgcattcttgaatttgatcatcatgttttcagtagtctctacaagcaagtcactgagcttaaactactattcaaaaacatgccctgatgtggaatgcattgatgccaaggcagtgaaggatgccactgctagggacaaaactgttccagctgcacttctgcgaatgcacttccatgactggttcgttcgggggtgtgacgcctctaggctgctaaattcaaaaggaagcagcatagcagaaaaagatcggccaccaaatgtttctttgcatgcattctatgtcattgatg

SEQ ID NO: 30040 - DNA, 408 bp, Glycine max
ggttctagtgtgtgattgtttgttgttgtaactcgttcttcttcttttgttgttctgtgtttgtgtttgttttttctctcacctgaaaatgtcttgctgcggtggtaactgtggttgcggaagctcctgcaagtgcggcaacggctgcggaggctgcaagatgtacccagacttgagctacactgagtcaaccaccaccgagaccttggtcatgggagtggcacctgttaaggctcaatttgagggtgctgaaatgggtgtgcccgctgagaacgatggctgcaaatgtggaccaaactgctcctgcaacccctgcacttgcaagtgaggtgttgggagagcaagcttcaagcagagatagcccttaattaggaataatgataaactattaatgtgtagcttaaaact

SEQ ID NO: 30041 - DNA, 422 bp, Glycine max
ggccggcaccaaagaaaaattcaaatttctcaaatctatccgacgtcgtcgcagatccaccaaccgttatggctgccttcagcggtgatgaaacggctccgtttttcggcttccttggagccgcagctgccctcgtcttctcctgtatgggagctgcctatggcacagcaaagagtggtgtgggcgtggcttccatgggtgtgatgagacctgagctggtgatgaagtctattgtccctgttgtcatggctggagttttgggtatttatggccttattattgctggtattatcagtaccggtattaatccaaaggccaaatcttattacctctttgatggttatgcacatctctcctctggtcttgcctgtggcttggctggcctttctgctggcatggctattggtattgtcggtgatgct

SEQ ID NO: 30042 - DNA, 377 bp, Glycine max
gagaggaaaagtaactccacacaacacatcacagcctaagagaattggattctaagctctagagagagagagagagagagagagagagaagaaagaatcatgtggtgctggaaaggagacggaggctagaagaagaagaaaaaaagaagagctagagagagggtaccctcttgttaatttgcactgtttttgtgtctgttgctgcacttttaggagttcttctattctaacaacctctgccaaccaacacaagcctgaaaataaaataaagatgctgcctccttgctggagatcgttcgggaagaaacaagaatgctactgacatgggaaagaaagggagttggttttctgcaatcaaaagagttttcacacaccac

SEQ ID NO: 30043 - DNA, 359 bp, Glycine max
ggaagaagaaggttggttgattggtcccgttgagtccgaagagaaaagaaaagatgtttgagccacaacagctatacactcgcgcgaagaccgatgaattcgacctcgaatcaggagaaaccctctacccagggctgagcgtcggcgagaaccagctccgatggggtttcatccgcaaggtctacggcatcctctccgcgcagatcgtcctcaccaccctcgtctccgtcaccaccgttttctatactccaatcaatgaccttctcaagggcaattccaccctcctcctcatcctccttttccttcccttcatctttttgattcccctgttgaagtaccagcagaagcattctcataat

SEQ ID NO: 30044 - DNA, 358 bp, Glycine max
  modified_base (305)..(307): a, c, g, t, unknown, or other
gtaacatggttaggtggttatagtaaacgcataccttgggcttctcgtccattccccttttttttgttagttgacaaatagatacctttttcccccgttcgtaatgatgcgcatcctgtaactcttgccgtccattgaattcaattgccttcttggcggtgctattttgatacaaggaaaataacactcgctgaaaagaaaaaaaaaaaaaaaaaaaaaaaaaaaaaaaaaaaaaaaaaaaaaaaaaaaaaaaaaaaaaaaaaaaaaaaaaaaaaaaaaaaaaaaaaaaaaaaaaaaattttttnnnaaaaaaaaaaaaaaaaaaaaaaaagggggccctttaaagggccccaatttt

SEQ ID NO: 30045 - DNA, 368 bp, Glycine max
ggggaaagtgggctgctgagattcgcgacccaagaaagggggttcgtgtttggcttggaactttcagcactgctgaagaagctgcaagagcttacgatgctgaagcaaggaggatccgtggcaagaaagccaaggtgaatttccctgatgagccttcaggcgctgcttcctcaaaacgtctcaaggcgaatccagaggctcagccaatgaagaaaaatctgaactctgtgaagccgaaaataaaccagatgttcaattttggtgacaatcttgagggctactacagccctatagatcaggtggaacagaaaccactggttaaccagtatgttaaccgtgccccgtttgctggaaatggagttcaagtc

SEQ ID NO: 30046 - DNA, 209 bp, Glycine max
gacggcgatgatgatgcaaatcaacatcacctccaccacctcaatcgtcacggcgttctcttcggatcattccccgaatgttctaccttgagccatgtccaacctcgttcagattcgcgtcgccggcgacgctagcgatggcttcgactctccggcgaagcagaaagcagccaaccgcagctcctacagcaatcgcccctttctctccc

SEQ ID NO: 30047 - DNA, 416 bp, Glycine max
ggaaacaagagggaaagccttatgacaaacccaacattgtcactggagccaacgttcaggtttgctgggagaaatttgcaaggtactttgaggtggagttaaaggaggtgaagctccgtgatgattattatgtaatggaccctgaaaaggccgtggaattggtggatgagaacactatttgtgttgctgctatccttggttccacactaaatggagagtttgaagatgtcaaacgcttaaatgatctcctaattgaaaagaacaaaataactgggtgggacactcctattcatgttgatgcagccagcggtgggttcatagccccatttatttacccagagcttgagtgggacttccggttacaactagtgaagagcatcaatgttagtgggcacaagtatgggttggtctatgct

SEQ ID NO: 30048 - DNA, 391 bp, Glycine max
ggaaatcggcaggggacggaaatatcgaaagagacagacagagcgacgtcggagaaagaaagaaaggaatgaatgaaagagggatggtaggagaaaaatgagaatggcgtgaatgtgaggagagaagagcctgaatattagaatcggatacccttaaagaagcggagataggagtgtgcgcctccaaacccaaggggcttcggaggggctcttcatcggaggcggtgctatattcccctccggattcccccaccatgaagagcctcttcaagcccaagccccgcactccttccgatatcgtcaaacaaacgcgagatcttcttctccgtctcacctcccgagatgacgataacatgcccgacttgaccaaaaaccttcaggacttaaagtc

SEQ ID NO: 30049 - DNA, 394 bp, Glycine max
ggggtaagagattctctttctttgagttgcgtgtgcaaagaaaagtggtctataaaaatctgctctcagtcccacttcccaattcattttcattccacgagatatggcttcaactctgcttcccctggcaaccttcttcttagttctctccgcttcttatctccagattgctggggcgaaagcacaaccgttgactagtctcaagcttaactctccgatccttcaggagtctattgctaaagagatcaatgaaaatcctgaggcaggatgggaggctgctataaatcctcatttctccaattatacagttgaacaatttaagcgccttcttggagtcaaaccaacgcctaagaaggaactgagaagtacacctgctatatctcacccaaagtca

SEQ ID NO: 30050 - DNA, 410 bp, Glycine max
ggagagagagatgagggaggtgtaagaaactggaaggagtaggtgttgttggcattctgacctaaagcttgtgtctttctgcttcgtttgtatcttctgctgcgtaaagaggatccctttctgattcttccgtaaatttcgtctctgaaactagggctaatacttcatctaccgatctctatattctggatgaaggtttgcttttgatccggcttgggagttttgatcgacttgattttaactccaacttttaagagttagtagtctctcttctggtccttggtgttcgcaataatagccaaaggaaaaagaaatttgaaagctttctatttctgtaccctgctaaatggccagtgaattgaatgtcattccgcagcatagttcgtgatgtaggggatagtttcggagct

SEQ ID NO: 30051 - DNA, 385 bp, Glycine max
cgcgaacaaaaactacagcgggcgcttagttttcggctgcggaatgacaacaggggggggggtggttttataaagggacaaaccacaatcgacgatctttcctccttatatggagggtgtgttttctaaaacgcaaccaaatataactttcgcgcaaacttcagatttgtataggtccctctctgacggtaagaaaatcaacgaccaacgcactatgggcaagagctattgttttgttactttcacaaatcctaggtctgcaatttgatgccattaacgacctgaatggcaaaatcattgacgggcgtgagattaaagttaatggggtgagggcctctgggggcatgtcaaattttgggagaaaacggtattatttataaaaata

SEQ ID NO: 30052 - DNA, 411 bp, Glycine max
  modified_base (370)..(370): a, c, g, t, unknown, or other
gaccacatagacacacacataggaaacaagccggtcatcccgcacacccacttacacaaattgtataattagtaaacgaccacatagacacacacacaacgaccacacactaatatatatatatatactcaattacatttccacacctcacttaacgttcgatacaattctctaagagtgcgtttggatagagaattttaactgaagaaagtaatttatgaagaatttaaagttttggaattttattttctttataaccttattctcttccacctgaaagtttccaaaatctcattcttgaactctcgaccttccctcgcattgatggtcctcttcttcaagaaacaccgtcagagcttgtggagtgtcnatcggttgcgaacgtgaagggacacgtagaactgtacctac

SEQ ID NO: 30053 - DNA, 391 bp, Glycine max
gggagcagaggacaagatgggtagtgtgagttatagcaatctgaagaacgccatgatagcattcttggtccctctaccctccatcctattctacctctcattccaatcggccattagtactccttcttcttggtcttctctgtggacatggtgctatcaccaccctctgctattggccaatgtccttttcttcttcaatgtcaatttcctcttctggctcatcggcctaatccaatccagccactggatgattgacccgtattggacagtgatacctgtgatgcttgttcattactattcaactcaccctttggcacagtatcagtggtggaagtcgaggaatcgaacgttgttgacttgggcgtggagtggtaagctgatccacaactac

SEQ ID NO: 30054 - DNA, 405 bp, Glycine max
gtaaccagagagaaacagccagatatgaatgacaaaaagctaattcaaacattatggttcaagccaaatgcattggatgaaccagtttctgcagttttaggacaaaacagttggctctatcttagcattatcatctcatcctcctttatgttattccttctacttattgccatcctaactagatattacatatatccaattgaccataatactgacatgatatacccttatttctcaaggtccagtctaagcatgttattcatatgcatatctatagcctttgtagcaacatctgctttcctatggaacaagaaacagaacaaggatttggggcagattaaaaacatttacacatccaattcatcaacttctccgggttcaggatactacaatgctgacagagaa

SEQ ID NO: 30055 - DNA, 127 bp, Glycine max
catgaatggaactttacatggtcctgcaggtcagtgttgttatagtcttcttgacattgtacacaggctttggactccaatagatggtgaatttgatgactacatcattaattcgaagcctaatggc

SEQ ID NO: 30056 - DNA, 243 bp, Glycine max
cacacgcgtgcgaacacgccagcatgcgcttatattgacgggtgcgagaagacaacatgggggggggtgattgtgtgaggatgcagccctaaaacttgagtttctctgcttgggttggagcttgtgctgtctaaagagggaccatgtctgaatgtggcgctaacttcgtctgtgaaactagggctaatacttgatataccgagctctatatgtcaggatgaacgattgcttttgatccgtgtt

SEQ ID NO: 30057 - DNA, 267 bp, Glycine max
ggcaagtgtgagtgatatttgagcttaaaccctagccgctcttctcttcattcttcactttggaaacaatcataatggcgttctgtaataaggttggaaatgtcttgaggcagggtgctgctcgcagcacacatgcccctgttgcgtccatgcttaattacatccgctgcatgtcttcaagcaagcttttcattggaggcctttcatatggagttgatgaccagtctcttaaggatgcattttctggctttggagatgtggttgatg

SEQ ID NO: 30058 - DNA, 432 bp, Glycine max
aaaagaacaacaaagggggaattaaaacccgtgaagcataccattgccccataccaccaagtcatgaaaaattggcctagggacaacatgagcagattagcacttcatgggaaatcagaattcaagaatcaagtctttggaccagagtcactcgagttcgatcacatgggtcgtggcccctacactggtttagccgatggacgcgttgttcgatggatgggggagcaacttggttgggaaacatttgcagttgtcacatctaattggacggagaagctttgctttaggggcaatgattcgaccactgcgaagcaatggaagcatgagaaaacatgtgggcgtcccctaggcctaagatttgacaaagtgaatggagatctatacatagcagacgcatactatggacttcttgtggttggacctaatggggga

SEQ ID NO: 30059 - DNA, 332 bp, Glycine max
ggcagcatcgtagagaaataagggaaaaatggtgtcgctgaaactgcagaagcgcctctccgcaagcgtgctcaagtgcggcagaggaaaggtttggcttgaccccaatgaagtcaacgaaatctccatggccaattctcggcaaaacatcaggaagttggttaaggatgggtttatcatcaggaagccaaccaagattcactcccgctcacgtgctcgtaggatgaaggaggcaaagaggaagggccgccactccggttatggtaaacgtaagggtacaagggaggcaaggcttcccaccaagatactctggatgaagaagatgcgtgtgc

SEQ ID NO: 30060 - DNA, 265 bp, Glycine max
gactgcaagaagagaaagtggcatcgctcacgtacagatgcagatacagacacaacctgcaaaagctgccgaccccagccctggactcttctttctgcagcggaggagtggatatatagctatacatgcctgctcaaaattctacacgccaagacagagacggacaatagagatcaactaactatcccaacttgccaatgtatactgagaagagtttctataaatgcaggactggtagcatactgatgatagattaaccaagctc

SEQ ID NO: 30061 - DNA, 340 bp, Glycine max
ggttgctcagtggatgcttcaagcaccaggtgccacaagtgacagaggttgcataggaaaggacaaatttggagaggagatgaagaagaaatgtacacttgatggtgtaaaggttaactattatgaaatcgacaatacacctactggaacttgtgctgtttgtgtggttggcggtgaaaggtcccttgttgccaacttatcagctgcaaattgctataagtctgagcatttgacgagaccggaaaattgtgcattagttgaaaaggccaagtatttctacatttctgggctttttcctcactgaatctcctgattccatacaattagttgctgaacatgc

SEQ ID NO: 30062 - DNA, 267 bp, Glycine max
  modified_base (179)..(179): a, c, g, t, unknown, or other
gggaagggtggtggcgcttgggttggtagcggcgaagaacgtcgttaatggaagaagagaaagaagcagtgatggtaacaccgggagaagtgttgggtagaaccagcgatgtcaaagctggaagaggagcatacgcggcgcttcacaacaacaccgtatacgcctccctaaccggcttncgccacaccgtaccttccgaccccgactcttccgacctgagaccgactgttgaagtaactggtcacaaggcccatggacctgttccac

SEQ ID NO: 30063 - DNA, 367 bp, Glycine max
gcgtacgcccacgcatactacatctgcgagatttcttcttaaggggaaggagcaacatattggcgttgtctataatctaggttatcgcgacgagaatatgaagttgtttgatatctttgatgctgcagtagatttggtagcatggccatgccatggcgcatgctaccaaaggttccctctccgaatgaaaactggctatggtgagcgttcttcggaggtaaaatgcgcaagttttaggcttgctgtggaagcacacaacattcgagcctttaaaaccattcctgaagagtgcgttgtaccaacaaaggacttcattaatggctaacaatttagatcatacattaaaacagcttaaccaacaagcttt

SEQ ID NO: 30064 - DNA, 411 bp, Glycine max
taaaagacctggattgctaaaagctaaaaatcatcgaagtgctggaattatcatggctgtcacggttgcattcttgaatttgatcatcatgttttcagtagtctctacaagcaagtcactgagcttaaactactattcaaaaacatgccctgatgtggaatgcattgttgccaaggcagtgaaggatgccactgctagggacaaaactgttccagctgcacttctgcgaatgcacttccatgactgtttcgttcgggggtgtgatgcctctgtgctgctaaattcaaaaggaagcaacaaagcaaaaaaagatgggccaccaaatgtttctttgcatgcattctatgtcattgatgcagcgaaaaaagcactagaagcttcatgcccaggtgtggtctcttgtgctgacat

SEQ ID NO: 30065 - DNA, 359 bp, Glycine max
ggacgaggaatgacttgagcagctgcaataaaaagagggtaactttcttcttcttctttctctccccagagaattcaattaatccaaacatgttcttttgaggttttggtcccggatcagccatgtttcttttcatatttctctcaaccctcgttttaatcgcggttcgagcgaagaagctatggatagcaatcgaagactggttccacgtgtaccagttcttcaaagtcccagaactcaacgaaaccacgcagcataaccacctctacaggaaggtctccctctacttacattccctaccttccatcgaagactctgtcttcgccaacctcatcactggcaaagaagcaaaacgacat

SEQ ID NO: 30066 - DNA, 402 bp, Glycine max
gacggctaaaagctaaatatcatcaaagtactcaaattagcatggctgtcatggttgcattcttgaatttgatcatcatcttttcagtagtctctacaacaggcaagtcactgagcttaaactactatgcaaaaacatgccctaatgtggagttcattgttgccaaggcagtaaaggatgccactgctagggacaaaactgttccagcagcaattctgcgaatgcacttccatgattgtttcgttcgggggtgtgatgcctctgtgctgctaaattcaaaaggaaacaacaaagcagaaaaagacgggccaccaaatgtttctttgcatgcattctatgtcattgatgcagcaaagaaagcactagaagcttcatgccctggtgtggtctcttgtgctgaca

SEQ ID NO: 30067 - DNA, 369 bp, Glycine max
ggggaggaagttgaaaagttggttacacaacttccagaaggtggtgttttgcttctagagaatgtgaggttctacaaggaggaagagaagaatgatcctgaatttgcaaagaagttggcttctctagctgatctctatgtgaatgatgcatttggcactgcccacagagctcatgcttctacagaaggagttgccaaatacttgaagccctctgttgcaggattcctaatgcagaaagagcttgattatctagttggggctgtgtcaaaccccaagagaccatttgctgctattgtcggtggatcgaaggtgtcttccaagattggagttattgaatcctttgtggagaaaggtaatgttctcttgctt

SEQ ID NO: 30068 - DNA, 403 bp, Glycine max
gtctacaaaattggtggtattggtaccgtgccagtgggacgtgttgagactggtgtcgtgaagcccggtatggtggtgacttttggtcccactgggctgacaactgaggttaagtctgttgagatgcaccatgaggctctcacagaggctcttccaggtgacaatgttggctttaatgtgaagaatgttgcagtcaaggatctcaagcgtggttttgttgcatccaactccaaggatgaccctgccaaggaagctgccaacttcacatctcaagtcattatcatgaaccaccctggccagattggaaatggatacgcaccggtgcttgattgccacacttctcacattgctgtcaagttttctgaaatcttgaccaagattgacaggcgatctggtaaggagc

SEQ ID NO: 30069 - DNA, 423 bp, Glycine max
gtacgacaaaacgggaagatggtggatatgaaaatactgggtttctaggagctaaagacattagaacagtgttcgaagatggagaaaatgatgcgactgagaccattgttccgatcactgagttgcagatcttatcatttcgttcttcgtccttctcttctctctcgctctcccaatcctcttccttctccttcaccctcagaatgcaggtctcctctctcaatgggtttagggagtatgagattctatagtgaagatgtgacccacatgcccaatattaaggaccctgtgctttacaatgctttcaaggatttgatggcggtaagttggagtgagcttccggattctgtcatatctgatgttaagaatgcactgtctaaaaacactgatgacaaagctggcaaggaggttgtggaaaatgtg

SEQ ID NO: 30070 - DNA, 475 bp, Glycine max
ccggaacggactgggccggctcgaccgacccgcccacccgctgtaacaggacgacaaaaccggaagctgatagatatgattttactgcatttctaggacctaaagaaattctctttctgaataaatgttgaatgcaatgaacctctggctattatcattcgatgcaaattacacaggaacagacttaatttttttagtcaaaagttatgttaaacattaaagaaaggtctattcttttatgtaattaaaagaaagtttaacaaaaatcgattgaattattttcttaaaatataaagatgttagcaaaatagaatgtgccatcaaagtagccaatgctggttgatttgattatagcctatactaaattagtttgtaattagttttcatgagcttaactcaactctacaaaatcaacttgtaaggtgaggatttgttcccacttatataagttatctcgacactatctttatttgat

SEQ ID NO: 30071 - DNA, 333 bp, Glycine max
gactcgcagttgtattgttgaacaagggtttctctgtctgcttcttcactttctctcgtttcaatcgaaaccaaaacaaaaacatgggcagaaaattcttcgtcggtggcaactggaaatgcaatgggaccactgaggaggtaaagaagattgttactactttgaatgaggctaaagtccctggagaagatgtcgtagaagttgttgtgagccctccttttgtgttccttcctgttgtaaaaagtttgctgcgccctgatttccatgtttcggcacaaaactgttgggttcgcaaaggtggtgcttataccggtgaggttagtgctgaaatgc

SEQ ID NO: 30072 - DNA, 309 bp, Glycine max
ttggggcagttgtattgttgaacaggggtgggtctgtctgcttcttcactttctctcgtttcaatcgaaaccaaaacaaaaacatgggcagaaaattcttcgtcggtggcaactggaaatgcaatgggaccactgaggaggtaaagaagattgttactactttgaatgaggctaaagtccctggagaagatgtcttataagatgttgtgagccctgcttttgagttccttcctgttggaaaaagtttgctgcgccctgattgccatgtttcggcacaaaactgttgggttcgcaaaggtggtgcttata

SEQ ID NO: 30073 - DNA, 275 bp, Glycine max
  modified_base (175)..(175): a, c, g, t, unknown, or other
gtggggcacccagagaggaggaagctttgagagaagagagagggaggagggagagtgttgacgctcaatcaggatgggtatttctagggattccatgcacaagaggcgtgccactggtggcaagaagaagcatggagaaagaagagaaagtatgagcttgggcgtcaggccgcanacacaaagttatcaagcaacaaactattcggaggattcgtgttcgaggtggcaaatgttaaatggaaggcattgaggttggataccggcaattactcatg

SEQ ID NO: 30074 - DNA, 194 bp, Glycine max
  modified_base (175)..(176): a, c, g, t, unknown, or other
  modified_base (178)..(178): a, c, g, t, unknown, or other
  modified_base (187)..(187): a, c, g, t, unknown, or other
ggacttcagagagaagaagaagaatcatggtgtggggactcttccccgtcgatcctctttcatgtgtagataagtactacatttactatactggactctacaaagaatgacgaaaagggtgagattaaatactctctaaggcttgaggaacggctgtggtgctcgcataaatagnngntaatacagngaacccg

SEQ ID NO: 30075 - DNA, 349 bp, Glycine max
ggacgatgaagtagcagtgctgccgttgaaatctatacaaatcacaaaaactgggatgtataacttgtatttcatccattgcgatacgaggcttaaagaattggttgttgaagggaaaactgtatggaaaaatccctctggttatctacctggtagaatggcgcctatgaaagttttctaccaattcatgtcttttgcgtatgtactgcttgggatcttttggttctctcaatatgctagattttggaaggaagtatttcccctgcagaactgcattaccgcagtgataaccctaggcatgtttgagatggctctgtggtactttgactatgctgaattcagtgagact

SEQ ID NO: 30076 - DNA, 286 bp, Glycine max
gactcgcagttgtattgttgagcaagggtttctctgtctgcttcgttcactttctctcgtttcaatcgaaaccaaaacaaacgcatgggcagaaaattcttcgtcggtggcaactggaaatgcaatgggaccactgaggaggtgaagaagattgttactactttgaatgaggctaaagtccctggagaagatgtcgtacaagttgttgcgagccctacttttgtgttccttactgctgtaaaaagcttgctgcgccctgatttacatgtttcggcacataactgtt

SEQ ID NO: 30077 - DNA, 374 bp, Glycine max
ggagtgagtagtgagaatggagtttcaagggttaccggaaggttgcattgctagtatactctctcgcactacgccggcggacgtgtgtaggttttccgtcgtatcaaagattttccgttcggccgctgaatcggacgctgtgtggaaacgttttctcccttccgattaccattccatcatttcccagtctccttcgcctctcaactatccttccaagaaggagctctatctcgctctctcggatcgccctatcatcatcgatcagggtaaaaagagctttcaattggagaaaaagagtgggaagaagtgttacatgcttgctgctagagctctcagcattatttggggtgacactgagcaatactggaactgga

SEQ ID NO: 30078 - DNA, 263 bp, Glycine max
attggatgggggcagtagtataattggaacaagggttaggtgtgactgcgtcgtcactttctctctttgcaaaccaagcctatacatacacatggacagaaaatgcttcagcggtggcaacttgcttagcaaagggaccactgaggaggcaaagagggattgaactacagggaatgatgctaaaggctctggaaaagatgccttataaattgttgtgagccctacctgtgggagcattacagtagcaaaacggacgactagcc

SEQ ID NO: 30079 - DNA, 327 bp, Glycine max; identical to SEQ ID NO: 25911

SEQ ID NO: 30080 - DNA, 423 bp, Glycine max
  modified_base (393)..(393): a, c, g, t, unknown, or other
gaccagacaatgctaatttaatgaaagtacatattttctgaactcagcattgtagggtggactacctttataggtggtccgtgaaccactattaatgaccctagggtgaatgatgttggtagtcagtctagatccgctcaaggccatggcaaacggtggtggtgctcgatccacatccacacaaggcccggacaaacaatggtggtgctcggtctagatccggttaaggccactacaaacgatcaaagtggtgctcatgatgttctctcgcgtttccagatctgatcatagagatcctcatccccgcctttgctgctacaactcttattatttactttaattatttttagtttggttgtattcgttaactgaagaattaggaatcttcaattntcttgatctgggtatatgtattttgggaac

SEQ ID NO: 30081 - DNA, 413 bp, Glycine max
gcgcaccgcattaacgactcctgatcacaatttaaggggagcttacaccatgtcactcacgacaatccgtggtgctgactagagcgctacctctcttaagttctcctacaactgcccaaatagataccactccaacccctgcaccatcacccgccccacacctggcgaacataagctccctactgtccgtcgccggcccattacagacctttctcaactatctctagcaaacaacagtcatcgaaacctttcaaaaccaaccaaacaacaccaaccagcgcatcaccatcttcctaccgaaggactccgacttctcgtccctcataaaaccgtcactagccaacctgacccaagaccaacttaagtccctccttttaatccatgcattcccgtaagtctacactatttaccat

SEQ ID NO: 30082 - DNA, 398 bp, Glycine max
gattttggggaggcctaatccctgaaaatgcacttaatacaagtattcttgatggtctcttaagtgctggtgttcttggtgtgaagtcttttatgtgtccttcaggaatagatgacttccccatggctactattgaccatatcaaggcaggattgtctgtgttggcaaaatatagaaggcctatagttgtgcatgctgagattcaacaagattttgaaaatcatttggagcttaatgaggataaccttgatccacgtgcttacttgacctatctcaataccaggccaccttcatgggaggaggcagccattaaacaacttgtaagtgttacgaaggacacaagaaaaggtggccctttagaaggagcacatgttcacatcgtccacttgtctgattca

SEQ ID NO: 30083 - DNA, 326 bp, Glycine max
  modified_base (251)..(251): a, c, g, t, unknown, or other
  modified_base (276)..(276): a, c, g, t, unknown, or other
ggacctccaatggagaaaacgcaacacattagacgagtacatttctaaaattcagaagacgtaatgccctttcgacctcttctagagccaccttaacattttccattcaataattaaattatcatcattattataataaactttacctataaacgcatccatgccttccccttcagttcgcagactcacaatggccgcaatatccaactccttatcactgaagcacaggttctctctgagtcgagctcctncttcttcctcttccatcaaattcanattcagaagatgttacgccgcgttcgcccatgagaatcgcgagtacgtga

SEQ ID NO: 30084 - DNA, 405 bp, Glycine max
ggccttggagttaatgatgaacatatggctgaacaagctttgaccttttataaaatagcgcttgagcgaaatttcacccgtggacgtaaatcagaacaagtacatgctgcttgtctctacattgcattccggcacaacaataaaccataccttcttattgatttttcaaattatttaaggacagatgtttatgtgctaggagcagttttcttgcagctttgtcaagtgttaaggcttggagagcacccaattgttcaaaagcctgttgatcctagtctttttattcatagatataccaagaatttgttaaagcgagggagtaaggctgtctctgatactgcactggccattgttgcaagcatgaaacgtgactggatgcagacagggaggaaacctagcggatta

SEQ ID NO: 30085 - DNA, 366 bp, Glycine max
ggagagagtgagtgagatagagagagacgcttcgcaaatttcaatcgaatctcagaaaaatgagagaaatcatcagcattcacatacgtcaggccgggatccaggtcggaaactcctgctgggaactctactgcctcgaacatggcatccagcccgacggcatgatgccttatgactccaccttcggtgtagcccacgacgccttcaacaccttattcagcgaaaccggatctggcaagcacgtcccccgtgctgtcttcgtcgacctcgaacccaccgtcatcgacgaggtccgctgcggcacctaccgtcaactctttcaccccgtacaacttatcttcggcaaggaagactccgtcaacaact

SEQ ID NO: 30086 - DNA, 238 bp, Glycine max
gggcgcgggtgaggtagaacccttacacggtggtgactgcgcgatgggtgcctacaagtatgtctcagagctatggcgcaagaagcagtctgatgtcatgcgcttcttgcaacgggtgaggtgctgagagtataggcagcaaccttgcattgttcgcttgacaaggtcgacccgtgctgacaaggctcgttgcttgagcttcaaggctaagcacggctatgtgatataccgtgttcgt

SEQ ID NO: 30087 - DNA, 385 bp, Glycine max
gatacaaaattggctcaatggcagggcaagctatgctagttccctttatattaccaaaagcctgtcttattttcttggtttctgacacaagatttttggtgaatgggattctggcacttatttttttgaaaatcactgcagaagaaagaacactcatttgagggactgttatagcctcattatctttatcctttagcactaaaataccatcaggtgtttccaatacttgtaattggttcttagatattcttccaatccaattgaatggggaaaccaagaagagaagatgttctttggtttgtgctttttttctggttttgtagcttttccaatgccttgctttcttcaaagggtgtgaactttgaaatgctagctttaatgggca

SEQ ID NO: 30088 - DNA, 400 bp, Glycine max
ggaacttatggcgtattcgaattaattaagagagtgggtagaataagctacttcactgccatgtaataacttgtcattggttctatatatgtttgatgtcgttgtatattcgagacttgtgaaagattaggttgatcctcttttgagcctcttttgtttacttttagtctttttctaatccatgttgaaagcacaaacatggtgtgttgttttatacaattcctcataacaacaattatgcaacagttagaaatttgtctcagaattctaaaccattataatttattttctgttgctttagaggaagcgtcctagcagaatattcgaattggaatctcagaattctcaactcaaagaggatttgaaggtcgtgaggaaccagctcggtgtgtctgaatca

SEQ ID NO: 30089 - DNA, 299 bp, Glycine max
tggacagattcaattgttaacttgcattttcatggtgtgccaatcgaagatctctgcttagattttacactccctggttattctgaatacaccttgaagccaggagatgaaatcgctgatatcaacaataaggaggagtatatatccttggttgcatatgcagctgtcatgactggaattatgctgtatacttaagcacttagagcacgtttgaaccatgcaatacgacatcattggctctcaaatatttactccatacgaactagttgggttgccttgcagatgcaatgatctttggt

SEQ ID NO: 30090 - DNA, 373 bp, Glycine max
caagcctacaagaagttgctcgatgctcttggccagcgaacggatacccttaacaggctggaggctgaaattaaagttaacgagaagcgtatgtccacgtttgaattgttgcgcccgaagaaggaactagtagaggaagttccattggaaccttttattcctcttactaaagaggaagaagttgaggttgcacatgccttttctaccaaccggaaaaagatcttggtttcccatgagaaatctggcattgagatctcgggagaaaagtttcaatgccttagaccgggtgcatggttaaacgatgaggtaataaatgtgtaccttgaattgctgaaagagagggagagaagagagccacagaagtttctgaact

SEQ ID NO: 30091 - DNA, 405 bp, Glycine max
  modified_base (342)..(342): a, c, g, t, unknown, or other
gggtttattgagtttaatagtcgtgctggagctgagagaattcttcaaacatataatggggcaataatgccaaatggggggcagagtttcaggttgaattgggcaacttttagtgctggtgagaggtcgcgccacgacgattctccagattacaccatatttgttggtgacttggctgcagatgttactgattatcttcttcaggagacatttagggctcgttataactcggtgaagggtgcaaaagttgtcattgataggctaactggccggaccaagggatatggctttgtaaggttttcagatgagagtgagcaagtgagggctatgactgagatgcanggggttctttctcaacaagacccatgaggatggaccccgctctaataaacccccaccattaat

SEQ ID NO: 30092 - DNA, 311 bp, Glycine max
gggcgcgggtgaggtagaacccttccacggtggtgactgcgcgatgggtgcctacaagtatgtttcagagctatggcgcaagaagcagtctgatgtcatgcgcttcttgcagcgggtgaggtgctgggagtataggcagcaaccttccattgttcgcttgacaaggtcgacccgccctgacaaggctcgtcgcttgggcttcaaggctaagcagggctatgtgatataccgtgttcgtgttaggaggggtggccgaaagaggccagttcccaaaggtattggttatgggaagcccacaaaccagggtgtta

SEQ ID NO: 30093 - DNA, 384 bp, Glycine max
cgaggcctgttggtcttcgtacatgtcaaggttctgcaggcagttaacttacagaggaaagatcttcttggagcatctgacccttacgcgaagcttaagcttactgaggataaattgccatcgccaaagactactgtgaagcactacaacttaaatcctcaatggtacgaataattcaatatggttgttaaagactcaaactcccaggctttagagattaatgtttatgactggtacctgcttgagaagcatgacaagctgaccatgaatgtgatccctttaaaagaagtttcccctgaagagactcaacgtctttctcttgacctgctaactgatatggctcctaatgatgtccaaaatgagaagtcactagtgcagattgtt

SEQ ID NO: 30094 - DNA, 401 bp, Glycine max
  modified_base (384)..(384): a, c, g, t, unknown, or other
gatgcctggttgaatggtgaattcattactactgttcaacaacgtggtgctgcaattatcaaagctagaaagctttcaagtgcactatcagctgctagtgctgcttgtgaccatattagagattgggttcttggaactcctcagggcacctgggtgtcaatgggagtatattctgatggttcctacaatgttccagctggactgatctattcattccctgtcacttgtgccaatggggaatggacaatagttcaaggacttcccattgatgagttctcaaggaagaagttggacttgaccgcagaagagctttctgaggagaaggcattggcttactcatgcctaaattagagaccatcgctccttcttggctactgtccttgntagtaggttcccatggt

SEQ ID NO: 30095 - DNA, 403 bp, Glycine max
gggcatatgaggttggtgcacaatcaatggtttgtccaatcattgttgaggatctcaatcctcctcgtcagatgctagtagagatgctttgtgaggaatgcggtttctttctggaaatagctgacttaatcagaggattaggtttaaccatcttgaagggagtcatggaagctcgcaatgacaagatctgggcacgctttgctgttgaggcaaacagggatgtaaccagcatggaaatatttatgtcactggttcgtcttttggatcaaacgatgaagggtggtgcatcttcgtcgaatgcaattgataacaacatgatgctgtatcattctttcccacaagctacccagataccagcaactggcaggcctagtagtttgcaatgaactacctacttatagtt

SEQ ID NO: 30096 - DNA, 320 bp, Glycine max
gtcctcaggtttgtcaaatatcgttgctcttcatcagctcttcaccctgaacactttgttaaccatgaccattgcttcaattcagactcattctatgcatctcttattgatcattctacccacaagggacaccttgatcaaatacataaccggttaggtatcttcgggctgcaacataatgggtttcctatggcccaaccggttaatggggggtccaatctttgaccaatttggtatgcccggcagcctgttggatgaatttggttcccctgcctggttaatgtggaaggctatctttgggagttattcaaggaccattt

SEQ ID NO: 30097 - DNA, 422 bp, Glycine max
  modified_base (380)..(380): a, c, g, t, unknown, or other
cagggaaacaagggaggaagcaaatgcagatgtagaagtaatttctccatttgcccaattggatattcctttaattggccaagtgagaaagaagctttgatttatttcttttattattttctttatttttttctttttatttccttgattaggtagagaattttgatcatgattatggaatgtttgaggcagagttacatgatattcttagcaaagctgaagaagcaccatttttcacctggtccagaatcatcagcatgccaactttttccacttgatgatatacctttcaattctctatccttttcatcaatggtggttaccttaagtttggtatgattcacaatcagatatttaaacatgctggctttagttgtttnttttttgtcgcctactcatactgtaaccatgtatttgtcatg

SEQ ID NO: 30098 - DNA, 299 bp, Glycine max
acgacagaaggggagactttttcattgcagcagttgcaaactgctcatgatgaatatgacgaagaggctacattgtttgttttccgattgaaatctctgaagcaaggacaatcgcgtagtcttctaacacaggcagcacgccaccatgctgctcagttatgtttcttcaagaaagcagtcaagtcccttgagacagtagaaccacatgttaaatcagtaactgaacagcaccacattgattaccacttcagtggtcttgaaaaggaggatggggatgaaggtgattatggaaatgatgt

SEQ ID NO: 30099 - DNA, 419 bp, Glycine max
  modified_base (352)..(352): a, c, g, t, unknown, or other
ggcacaagtttgttgagatagctagaagcaataagatgaaaatgaaagtgcttgttttgtttgttgctacagttttggtagcatatgaatgccatggctcagactaccagaagttccctctccaaatgaaaactgggtttggtgggcaatacagcaatgaggtggcatgtgccagttggaggcttggcgtggaagcaaacaacgtagtcaagtggcaaactgttcctgcagcttgcggagagtacatagctgactacgttctaggagaccaatatagatcagattccaaaacagttaaccaacaagcttatttctatgctaaatccctcaaactcaccaacaaagatgtctntgtcttggacgttgacgacactactctctctaatctccagtattttgctaaccatggatttgtgtgg

SEQ ID NO: 30100 - DNA, 400 bp, Glycine max
agaaaaggtatttgtatttcttatgcttatttgctttctagagagtattaatctgtgttttaaggcaattgtaatattctgctttatattaagtttcttgatagcttttgtacaaaaaacaaagctttttcccatctacttttgcccaactttattactgctgaatattgatttactttctatgcattcagcagtgaaaaaaaaagcgctttaagtttgcacaacaataaatctcttagcaataataaatactctttgattaattgcaattaatttttcatataaaacaaaattccatctcatcaccacttgtgattcgttgtaggaagctgtggaatgggagtacacatctaaagttgccggcataatgcatgcttgtcggcacgactcacatgttgct

SEQ ID NO: 30101 - DNA, 418 bp, Glycine max
gggagcagaggacaagatgggtagtgtgagttatagcaatctgaagaacgccatgatagcattcttggtccctctaccctccatcctattctacctctcattccaatcggccattagtactccttcttcttggtcttctctgtggacatggtgctatcaccaccctctgctattggccaatgtccttttcttcttcaatgtcaatttcctcttctggctcatcggcctaatccaatccagccactggatgattgacccgtattggacagtgatacctgtgatgcttgttcattactattcaactcaccctttggcacagtatcagtggtggaggtcgaggatcgtaacgttgttgacttgggcgtggagtgttaggctgatccacaactacttcaggcgagaaaagtggcagtggggt

SEQ ID NO: 30102 - DNA, 383 bp, Glycine max
ggcacgattcctgtttgagtttgcatcctaaagttcatcagctaaatgtgagcacagagacacttgttccaactcctttgtcaatgactggcctatacaatatgaatttactggggcgccaattccaacccaagatgctgcggaataaaaatctcggaacctctttgcaattgagctcaaatccaacgccaatccacccaccagagcatgcggtgagcccaaagcaaatgcctgtaacaaccgacctggtccttgggcaaacaaagccagctgatgccgttccagaagaaacacacaaagaaggcattaatgacttcttgagctgcctctcttccgagtcacaggacaagttcgatgaattacagagcaaaaagcttgatgat

SEQ ID NO: 30103 - DNA, 368 bp, Glycine max
cagacagcggaagcgtgaaatcgtacggtgaagatttgccggaggatgcggtgagagtgacgcgaagtatcatgatcgtgaaaccacctggtggtaaccagagtccgagcggatccgctccggcttcccccgccggttctactcctccggtgtctcctttttcgggagctagagagtccttccgttttcggagaaggtcgacatcagatgcgtacgagaagacaggccagaacagaccaagctcttcttctcctttcgatgtgtgacaaatgagcccgaccactatctcctccatatatggatgactgaaaatacaaatatatagtttgttttcctctggcctttgctgatgatgctgtgttccattt

SEQ ID NO: 30104 - DNA, 304 bp, Glycine max
gacaccaggcaagatatatggtgagcatcaccgtgctatcatggcccccctctgacagatgtggactgtgtcaactgagccagtttctccgtctgatcatgggtgatcctactcgtgctactgcgtggatacaccgaacatgccagacgatcaagatatgctcaatgaaaaggatacgctacatgtgcaggtgatatattgagcaaagagtcatcttcaggtgagtcaaatggatcttcttgacattgacttcattgcgcgactcatacatggttattacggcctaatccaacttgcatgtact

SEQ ID NO: 30105 - DNA, 404 bp, Glycine max
  modified_base (385)..(385): a, c, g, t, unknown, or other
ggagggggagagtttcattgggaaggtaaacccagcctttgtttgcaccattccctcaaaccatttacatcagcatccaccactctctcctccctcctttctgctttcttctttctatttcaacaacccaagttatagattatttatgcgtgcgtgcatcttcttttttcctctcactagtgaatgctctagtgggtggtagtaagttttaagagactaaacacccgtttttccaaggaaatttgtgcagactttgtcagggaagttacagtgggaaaaaaaaccctcttccacttcatgtaacagacacacaactacagcactagatcactgttttggattttttatgtaaaaaaggcctgcaacttgtagcataaaatccggnggtgccctgaagtaactca

SEQ ID NO: 30106 - DNA, 400 bp, Glycine max
ggccggagacagaggtagtttccacgacggtgcaggtcgcgacacgaaggggcttcttgcggcgtgagatcgtgcgattataccgatcctaacagagtgagatttcagggttacataatgaccaagaagaagaaacaaaatggggttgttgttggagagggtgatggtgttggtggtgttgtagatttggagtctgtcatacacaaccacgctctttttttcgacaagttgattgaattgattcccgccaagttctatctgccaactgatgacaaggagaagccatggtttcagggtctaaacaaggctgcaaaagctaaggcaaagaaagagaccaaggagaatatcaagaagtctcggaaggaccgtttagaccctgacaaaccttttgcaactaccc

SEQ ID NO: 30107 - DNA, 399 bp, Glycine max
ggatgtaaagccaagctaagctaaggttgacactgttttacaccaacttttctctctctctgtgtacagcctaagcttaagcttatccctccccacttgttgcctctgccgtatgttatagccaaaagggtgtgtgagagagagaaacataaacacaaccaaccatcaagggaagttagagagagagttgagttgtgttgagagagatagagagatagaggagaagatgaacggtggtgaatcttacggtgctattgagacacaatacataaggaggcatcacaaacatgaaccaagggaaaaccagtgcacctctgcacttgttaaacacataagagctcctgttcaccttgtgtggtcactggtgagaagatttgatcaacctcagaaatataaacc

SEQ ID NO: 30108 - DNA, 370 bp, Glycine max
  modified_base (361)..(361): a, c, g, t, unknown, or other
gatagcagcatcatacaaagcattgaattcaaaaactaagttcatttcttgtgctttgctttattcctcaaaaccaaacatgtcgaacacatgcggcaactgtgactgcgctgacaagactaactgcaccaagggaaacagctatggtgttatagtagagactgagaagagctacatcgagactgttgacatggatgttccagcagctgagcatgatgggaagtgcaagtgtggcactaactgcacttgcacggactgcacttgtggccattaaggaatatgtatgaaaatgtaattgccatgtgtttggcaatacaaatctccaaataatgtaatcttcgtatgaataaatgtgtgctgntatcctact

SEQ ID NO: 30109 - DNA, 433 bp, Glycine max
gtactttcacgggacattcaacatctgttatgtcactagatgttcatccaaataaagatgacctcatctgctcttgtgatggtgatggtgagatacggtattggagcataaacaatggcagttgtgctagagtgtccaagggtggcaccacacagatgagatttcagcctcgtctcgggaggtaccttgctgcagcggcagagaatattgcgtctatatttgatgtggagacacaagcgtgtcgatattcactaaagggacacacaaaaccagtggattgtgtttgttgtgatccttctggggagttgctggcatctgtgagtgaggactctgtcagggtttggactcttggatcagggaatgaagggaaagtgttcatgaactaagctgtatggcaataagtttcatgcatctgttttccacccaacgtacc

SEQ ID NO: 30110 - DNA, 269 bp, Glycine max
gacagcacaacttgtttatcggaacgttgctataaacgttgttgttttcagataaacacgtgactcactatctatctatcaatcgatatctccgagttcagccgaaccaaactccgaagctatggcagagctccaaaccaaggttgaacctgttacggtcccggctccggtggatcccgagccaccgctagctgaggctccgccgctcgagaagaaagcggtggcggtgccaccacctgttccggctgcggcagaggaaaccaaagctc

SEQ ID NO: 30111 - DNA, 415 bp, Glycine max
ggagggagagaggatccaaatccaagtacggttgggttggagagaaaatgcgtccctgctgaaaacaccaaaccctaaaacgcgaaaagggttctaagaatttgcgaaggaaagagctagcggggatggagattcactacagtaacagctatttcgagaggcgccccatcctcaagtccaaggctgccgctgtcaaatgggtcaaagaatgggttccccaagatcttgtgacaacaggagggaagtgcatgatcttaaaatgggtaacagaggataccttgaagaccttgaaagaaaaggtaaaagagccttcagtgccagagccagaacctgagccaactactgaagtactttttctttgcagctatgatggctgtggaaagacattcatagatgctggtgcattgaggaaaca

SEQ ID NO: 30112 - DNA, 394 bp, Glycine max
agaaaaggtatttgtattttttatgcttatttgctttctagagagtattaatctgtgttttaaggcaattgtaatattttgctttttattaagtttcttgatagcttttgtacaaaaaacaaagctttttcccatctacttttgcccaactttattactgctgaatattgatttactttctatgcattcagcagtgaaaaaaaaagcgctttaagtttgcacaacaataaatctcttagcaataataaatactctttgattaattgcaattaatttttcatataaaacaaaattccatctcatcaccacttgagattcgatgtatgaagctgtggaatgggagtacaaatctaaagttgcccgcataatgcatgcttgtgtgcacgacgcacat

SEQ ID NO: 30113 - DNA, 325 bp, Glycine max
caaaggggattaaaggcagaggtattgccattgcctctggggcttgcaacaccaaactgatacacacttaatactattatagtaaaaattagccaccaaagtacactaaccgctattatcatacaactcaatagctagattggagcaacgtgaaagatctatcatttgcaaccaatgccattgaacatatgtaaagacatatatatattgccacggattatattgactgaaccaaaggattcattaactgatgttctgctttatacatggcatatcatttattggaagaattatctaatggaagaacttctttttatgagcagta

SEQ ID NO: 30114 - DNA, 388 bp, Glycine max
gaagggtgtggtgcgtgtaagtaatttgaaagatgctgcagaccatataggtgaggttttgaaacgtgtgaagaaagagcatttggagagagcatataaaataaaagagtgggatgatgagaatgacttcttactgcagctttgcaaatcaactggcaaacttctgaagggtggtgagcctgacttgatgactgcggcaaagatgatacttcatgactggcagaggggtcgaattcccttttttgatccccctcctatgcaggaggacttgtctgaggaacctaatgttaatggtgttgacctagatgattcagttgatggcaactaggcttctgctgctatgaaggctatcgcagatgttctttcatcgcagcaacaaataaatgta

SEQ ID NO: 30115 - DNA, 296 bp, Glycine max
cgattacaattttgcgtggcaaggattttcattcgtatcggaatgacattcagagacgttgactccctttgactcccgaatcattggccaacctttctgccttttactccattactttcaataccgatgatgccgatggacggaattgcaagcctgaagtggctaaaactggtttgggctcttctgcagcgattgcaatggctgtagttgctgctctactgcattacctggatgctgtcaagctttcctcttcgaacgatcctcgggaaaggaatgatgttgcagatcttgatatg

SEQ ID NO: 30116 - DNA, 395 bp, Glycine max
gaaaacaacggtgacaacaacaacaatggctcttcacacacgacaacgttgctcattggctcaaagacgcatcatcattccttttacaaaagtaacaactatccattccctcattcatcatccgcggcatgctagatatatatacatatatatatagttccgagctaatatatatatgtaattaaagataggtgattagtgattattactattagagatcaatcccccatgcaccacatgctttcttatatatatgtatacttcataaatggaaagatcaattcatagagatttttctaatttgttgtaatttattttatatgtaatatatttatggtctatgcgtacattacatatgaataacaatgcaaggttatcacatagttcaatcaaaa

SEQ ID NO: 30117 - DNA, 292 bp, Glycine max
gatatatatgtaatagaaggtgtcaaaacacttgaactttaggctccatctcaaaaaaatgggtggtttagctagcaatcttcctctaattgttatggtgggtctgcaaattcattatgcagcacttgctatattcacaagagccgctttgttagatggattgagtacgacggtctttgtagtgtacaagcaaggcatagccactttggctttggcgcctatgtttttctctcctaagcggagacaatcagtgaaagattctttgggattcaagagcttctttttgatggtt

SEQ ID NO: 30118 - DNA, 375 bp, Glycine max
gacatggatcgatttggagatgttgatgctttagatgataatgttgaatcctttctatcaaatgatggcggagatggtgggaatctctatggaacagtgaaacaaagtccagctgagcaacagaaagagtcttctaaaggtttcacctttgctgaagttggttgcagaagaacaaggaacagcaaagttacttgttgtcacttttcctcagatggaaagtggctagccagtgctggagatgacatgaaggttgacatctggaacatggacactttagaaacagagagcactcctgcagaacacaaatcagttattacagatgtccgttttagacctaattcatctcagttggcgactgcttcaactgataaatct

SEQ ID NO: 30119 - DNA, 285 bp, Glycine max
gtgactgatcgaaagttaaatcagatcagaagactctacgcaggcgtgctcataaccgtgaagttgccagaaaaagccgcttgcgaaagaaagcgtatgttcaacagttggaaagtagtcgattgaatctgacccaactagagcaatgagcttcagcgagctaggcagcaatggattttcatatcaagctccggtgatcaagcacatacattgagtgtaaatggggcaatgcaatttgactcactatatgctatgtggctggtatagcaaaatcgacaaaataat

SEQ ID NO: 30120 - DNA, 425 bp, Glycine max
ggcggtttctgcaattggttttgaaggtttcgagaagaggctggaaatatcctttttccagccgggactttttgctgaccctgagggaatgggtttaagagctcttgcaaagtcccagttggatgagatacttacaccggctgcttgcaccattgtttcatctctcagaaatgatcatgtcgactcctatgttctgtctgagtccagtctctttgtttatgcctacaagatcatcatcaaaacctgtggtactacaaagctactgcttgcaatcccacccatattgaaatttgctgaaatgctttccctcaatgttagatctgtgaattacaccaggggaagtttcatctttcccggagctcagccctatccccatcgcaacttttctgaggaagttgctattcttgatggctactttggcaagc

SEQ ID NO: 30121 - DNA, 286 bp, Glycine max
gaagagaatgatgcggatttggaatcggaatcactgaaagcgttgcttaacatgagaagaaatgcaaaagagaaagagctagaggcattgctttctggggagcaagattcttggtcgtgctacattgagggtcaagctggtgctgggggtactgagagcatggactgggctgcaatggtcatgcagatgtataagtcatgggcacagcaacgtggatataaagtaactgtagtggatgaaatgcctggtgagattgcaggaatcaagcgagctaccatcaaagtag

SEQ ID NO: 30122 - DNA, 411 bp, Glycine max
gattcatatgttgtctattgttatgttaattggtcttgctagttgctagcacatcaatttctattatgtgttggatgacatcatggttcagccagattctatttttttctggttcttttccattttcatctttggtttatgattgatcattgctgagaaaattatcctcaactgggattttcatttccggggggagcatgacctgaattgcatggtttttttttttgttttttggctagattatatcaaatcaattaagattctgggttggatggcatgatggtttagccagattctgttttttctggttcttttttagtttcgatcgttggcttatgatttatcattgctgaaaaagttattctcaactaagaattttctttttctggggggaacctgaaatgaattgca

SEQ ID NO: 30123 - DNA, 352 bp, Glycine max
gagagaatgatgatgaagtctgctatgtgtgcagtggtggttgtagcacttcttcttctggcggaggtggggcccatggctgaggctgtgacatgcaccccaacagagttgagtccgtgtcttccagcaatcacttccggtgctaaaccttccaatgcttgttgcacgaagctgaagcagcaaaaaccatgcttatgtggctacctcaaaaacgctagcttgaagcagtatgttaactctcctaatgcccgaaaaaccgttgcttcttgtgggattccctttccaacttgttaattaattaagccttcttataattaaagtgtgggatatatatatatatatagataaacag

SEQ ID NO: 30124 - DNA, 347 bp, Glycine max
ggagttgaaggaggtgaagctccgtgatgaatactatgttatggaccctgaaaaggccgtggaattggtggatgagaacactatttgtgttgctgctatccttggttcaacactaaatggagaatttgaagatgtcaaacgcttaaatgatctcctaattgaaaagaataaaataactgggtgggacactcctattcatgttgatgcaacaagtggtggcttcattgccccatttctttacccagagcttgagtgggacttccgggtaccacttgtgaagagcatcaatgttagtggccacaagtatggtttggtctatgctggaatcggatgggttatctggagaa

SEQ ID NO: 30125 - DNA, 355 bp, Glycine max
  modified_base (290)..(290): a, c, g, t, unknown, or other
ggagtgagacaatatcacacataatataattccaaaatcactcctattgctatagcaatatgatgggtgacactgagatcaaaccatcagttgaagtagtcatatgtgcttccatgaacaataacaatagcgcaaacaaccacaccctcccaaccgacatcaccaagtcatcacaatcacacttaccaatcttgaccaagctccatgctggttactttttcatatgcctttcctttggtgcacaagctttgctctggaagagtttgagtaaacacaacaaggactcacanactctctggcatggattcaatttgatgccttccattgcgtttctactactttggtgtgtggcact

SEQ ID NO: 30126 - DNA, 399 bp, Glycine max
gtagtacaaatataaaaaacatatttaggtcttcttaagttggttactaatattaatactaataatcgttgaaataaaatatgaattttaattaaaaaacaatactaataatatttatggtattgtgtttgaatttaataagagcaaattatactgacaaagcgtgaagtgtcttagattcgacgaaacctcaaattattctatgttcgagactatttggactttggctaggctctgtttgttatactcacctagttaagttatatttcctccaattttaaatattagaaaaaaaaacaccccattttttttgtctcaattataagaaaattcaactaacgttatcttatttattattatctctaaattatccttcatttaattgatggattaattata

SEQ ID NO: 30127 - DNA, 434 bp, Glycine max
gaaggcatgtagtggtactagggaagaaaagctagtaaaagttctctagtaagatcactttcaggggatattatagggaagaaattctagattaagaatagaacttgtctatagtttggaattatgcactcgatttgagattccatttgaatggatatgtcaaccataacaactatattgaattacaatatgctatctttgtgaattaaatatgcatatgacatggaaaatggaaataagtcatgacacatcctgacaaagcaagggtatagataatgatatcttctttctatgaatcctttgcaagaaaaatggaaagagcaaataatgattccttaggtaatgaaaagagcatgtagtggaatatcctgagtcccaacacgaaactattaagtaaaatacagagattccttaagtaatatttggatattgat

SEQ ID NO: 30128 - DNA, 388 bp, Glycine max
gttagagagagagagaaacaagtcagcacccgggtgtagcctctcttctattcttagatcgccgataccctttttgctttctcaaccgagagagatagacagaatctttcgtagttcggtcgcgtgtgttgagttgacagtcaccaatggcatcaccatctgctaggacacgttcccattacgattacctgatcaagcttctatcttataggcgatagacagtgtgtgaacgagctgactgcttatgcgatgtcctgaggggtccttcacaaccggatgttatcaccaccattggcattgagattacgatgacatccattgaacttgatggcaaacgcataaagctacaaatctgtgatacagcttgccatgaaccgatttctactat

SEQ ID NO: 30129 - DNA, 390 bp, Glycine max
tcattaagtcatggtcagcacatagattgtggtggcagcacaatggatcctggcagtggaggaaatggtcttagcaacaactctaatctcacctcaaaacaacgtttacggtggacacatgaattgcatgagcgctttgttgatgctgtggctcaacttggtgggccagatcgtgccacacccaaaggcgtgctcagagttatgggtgtacaaggcttgaccatttaccatgtcaaaagtcatttacagaaataccgacttgcaaaatatttacctgactcttcatctgatgaagggaaaaaggccgacaagaaagaaacaggggatatgctttccaatcttgatggttcatctgggatgcagattactgaagcactaaagcttcaaatg

SEQ ID NO: 30130 - DNA, 346 bp, Glycine max
ggaggagactgagaaaacagaagaaaacaaagtggaagacacagtttctgcgttgaggtctttgatggtttctcactctccgccgctggatgccttagtggtgccctctgaagattatcacctgagcgaatatgtgtctgcacgagacaagcgccgcgaattcgtttccggcttcactggaagtgccggcttggcacttataacaaagaaagaagcactgctgtggacggatggacggtattttttgcaggctgagaaagaacttagtgctgggtggaagctaatgcgaattggtgaagatcctgctgtagatatctggatggccgataatttgccaaaagaagca

SEQ ID NO: 30131 - DNA, 335 bp, Glycine max
ggcacaccaacaccaaaacaaacccactaagatggcttcctttgtatccttcctagtgctgcttcttgcagcccttatcctcatgcctcaagggcttgctacttactacaaaccaattaagaagccaccagtgtacaagcctccagtgtacaagccaccagtgtacaaaccaccggtttataagccaaaaccaccggtttacaagccgaaaccaccggtttacaagccaccatataagaagccaccatacaagaaaccaccttatggaaagtaccctccagtagaggacaacacccatgcctaaagcaagcaatgaggtctattatctacttaat

SEQ ID NO: 30132 - DNA, 402 bp, Glycine max
ggaggattgaggcagagaagaagccgaagacgaagatcgtgtgcactctgggccccgcatcacggtcggtcccaatgatcgagaagcttctgcgagcaggcatgaacgtggcgcgcttcaacttctcccatgggtcccacgagtaccaccaggaaaccctcgacaacctccgcgccgccatggagaacaccggtattctctgcgccgtcatgctcgacaccaaggggcctgagattcgaactggttttctcaaggacggtaagcctatccaactgatacaaggtaatgaaataaccatttccactgactatgacctaaagggagatgagaagacgatttgtatgagctacaaaaagctgcctgaggatgtgaaacccgggatggtcatactctgtgcggatg

SEQ ID NO: 30133 - DNA, 292 bp, Glycine max
  modified_base (178)..(178): a, c, g, t, unknown, or other
ggaggattgaggcagagaagaagccgaagacgaagatcgtgtgcactctgggccccgcatcacggtcggtcccaatgatcgagaagcttctgcgagcaggcatgaacgtggcgcgcttcaacttctcccatgggtcccacgagtaccaccaggaaaccctcgacaacctccgcgccgncatggagaacaccggtattctctgcgccgtcatgctcgacaccaaggggcctgagattcgaactggttttctcaaggacggtaagcctatccaactgatacaaggtaatgaaat

SEQ ID NO: 30134 - DNA, 414 bp, Glycine max
ggtagagtgaagagaatggctcccaagggtttaacctttctggctgtgttaatatgcgtttcagcactgtcactgagtccttctgttgcgggggaagggcaaaataatggccttgttatgaacttctacaaggaatcatgccctcaggctgaagacatcatcacagaacaagtcaagcttctctacaagcgccacaagaacactgctttctcctggctcaggaacatcttccatgactgtgctgttcagagttgtgatgcttcactgttgctggactccacaagaaggagcttgtctgagaaggaaacagatagaagctttgggttgagaaatttcaggtacattgagaccatcaaagaagctttggaaagagaatgccctggagttgtttcatgtgctgatattctcgttctc

SEQ ID NO: 30135 - DNA, 328 bp, Glycine max
  modified_base (300)..(300): a, c, g, t, unknown, or other
gtacccagacttgagctacactgagtcaaccaccaccgagaccttggtcatgggagtggcacctgttaaggctcaatttgagggtgctgaaatgggtgtgcccgctgagaacggtggctgcaaatgtggaccaaactgctcctgcaacccctgcacttgcaagtgaggtgttgggagagcaagcttcaagcagagatagcccttaattaggaataatgataaactattaatgtgtagctaaaaacttatgtattatgtctgtgatggttttcgtgcactctggtgttttgtgttaaacanacatccttagaataaagtggtcatgtct

SEQ ID NO: 30136 - DNA, 402 bp, Glycine max
cggggaacatagtccgaggaacaggcaccacatgtatggcagggagttccgatcgatgttggacggactcgacgaggaagggtgtgttgaagaaccggggcatcaatctgagaagaagcgtcgactaagtgtggaacaagtgaaggctttggagaagaactttgaggttgaaaacaagcttgaacctgagaggaaggtcaagcttgcccaagaacttgggttgcaacctagacaagtagccgtttggttccaaaaccaccgagccagatggaaaaccatacaattggagagagattatggtgtcctcaaagccaattatgatgctcttaagcttaactttggcaccctcaatcaggacaacgaagccttacgaaagcagataaaggaattgaaatcgaggct

SEQ ID NO: 30137 - DNA, 366 bp, Glycine max
gaccaaaaacaaaacaagccaagtgaaagagagaagaaaagtcaaagacaatgtcagggatcattcacaagattgaggagacccttcatgtgggaggccacaagaaggaggaggagcacaagggtgagcagcaccatggtggagaatacaaaggggagcatcatggtgaacacagtactgaatacaaaggagagcatcatgttggtgagcacaagccggagcaccatggaggagaagagcacaaagaggggttcctagacaagatcaaggacaagatccacggctaggagggtggcgccaccgccgagggcgagaagatgaagacgacgaaggagaagacgaagcatgaacatggccatgacagca

SEQ ID NO: 30138 - DNA, 389 bp, Glycine max
gagagaaagagagagaaagatgtcgaagcgtggtcgtggtggttcggcggggaacaagttccgcatgtcgctgggtcttccagtggcggcgacggtgaactgcgccgacaacacgggggcgaagaacctctacatcatttcggtgaaagggatcaaaggccgtttgaaccgtcttccctcggcctgcgttggcgacatggtgatggccaccgcgaagaagggaaaacccgatctgaggaagaaggtcttgccagctgtcatcgttcgccagcgcaagccatggcgccgaaaggacggcgtctacatgtacttcgaagataatgctggtgttattgtcaatcccaagggagaaatgaaaggttctgctatcactggtcccattggaaaag

SEQ ID NO: 30139 - DNA, 399 bp, Glycine max
ggagccaacaacaacatcattgatgcaatttctgttcccataaataatgcccgggagaaggagaaggaagttgaaatcgttgagtgatacaattaccgacagcagactggcatcagtggaggtggaaaatgaatatttagagctgcaaacttggtctgatctccctactgaactcttggaattaatactatcccgtttaagtctagatgataatgttcgagcttcggttgcttgtaagagatggcattctgttgccacttctgtatgtgtggtaaaccaatcaccatggctaatgtattttccgaaatttggtgactggtatgaattctatgaccccgcgcactcgaaaacctattccatcgagttgccacaattgaggggatctagagtttgttacac

SEQ ID NO: 30140 - DNA, 388 bp, Glycine max
gaagagagagagagagagcgagatttttttgtacacttgacatgtcttcatattttccaagctttgctacaaaaatcccacgtatgggaaagggatacgatgatgtgttgttcacagtgaccaaccaattagtaaaatcaggttcatggtccaacaactataaagtgccctgcaacctctcaaagcagcacattggttttgtatcgaaattcgaccaaatttgttcttctcctgtgatggaggacgagcataaaaagttggattctttgcctgaaattgaattatcagagtcagaggaatattccaaggaattggaagtggctgttagagcagtgcaaatggcgtgttccctctgccagagagtgcaggacactttgatttccaacgc

SEQ ID NO: 30141 - DNA, 381 bp, Glycine max
gaggcaacagataagaaaaaatagatcagtggcggtacgtgaaagttaacgccattaatggagtctgagaagaatttaaggctgccactctctgatgatcgcaatcagagggatgaaagacaacgaaaagtttcagccatgacaagaagaggagtcttcgctgccttatcatatatggcctattcggttctcttggtcatgttcaacaaagcagccctctactgttacaatttcccatttgcaaatgtcatcacacttgctcagatggtgtttgcatttattattctctacgtgttgagatccttgaagataatttctttcacagctggtgaatcgctgagcagttctaagaatacaataatatttgtgtcctataggaca

SEQ ID NO: 30142 - DNA, 394 bp, Glycine max
ggcaggaggtggtggagctccagcacctaagattgatgagccacaacctcatcccccgaaggatcagttaccgaatgtttcttactgcattacgagtcctcctccatggcctgaggccatacttcttggttttcaacattatcttgtgatgctcggtacaactgtgctaattcccactgctcttgttccccagatgggaggtggcaatgaggagaaggcaaaagttatccaaactctactttttgtagctggaattaacacattgctgcaaactctgtttggaactcgattgcctgcagtaattggagggtcttatacttacgttgcaacaacaatctctattattctttctggtcgattcagtgatgagccagatcctatagagaaattcaag

SEQ ID NO: 30143 - DNA, 379 bp, Glycine max
gcagcaaggagatgatcatctctctgaatctagaatttcaacacaagcttcagtggaggaatcaatcttccagcaagttagtggtgaggtggaagaaaatcaccatgtagaccctgtttatgatcttagtccacaagcttctgaaacactccaattgtttccttcaatatcttctcatgattctgctatggagttgtctgagagggcattgcctcctgcttcagtagaaatgactgctaatgcggcagaagaagagtccaaagtgcatgatcacagactggaaggtaatacttctgatcatgataaaactcaagcagcctcttccgaactacatgaggaagccaaaaatgaattgagttctgagaaatctgaagatgtg

SEQ ID NO: 30144 - DNA, 412 bp, Glycine max
ggagcaagagtgaagagcgaagagaatggctcccaagggtttaatctttttggctgtgttatgcttctcagcactgtcactgagtcgttgtcttgcggaggataatggacttgttatgaacttctacaaggaatcatgccctcaggctgaagacatcatcaaagaacaagtcaagcttctctacaagcgccacaagaacactgctttctcctggctcagaaacatcttccatgactgtgctgttcagagttgtgatgcttcactgttgctggactccacaagaaggagcttgtctgagaaggaaacagatagaagctttgggttgagaaatttcaggtacattgagaccatcaaagaagctttggaaagggaatgcccaggagttgtttcctgtgctgatatcctcggtctc

SEQ ID NO: 30145 - DNA, 244 bp, Glycine max
ggattttcttgtaattttgaaaaaacacagtgaaagtggtggcacggcagcaaaacaagcgacggggaagcacttactcttccgatttgggaactaaccaaacagatcacagcttctagggttttaggttccgtccaattagcggattctctctctctctcttcagaaatggataacagtagctcagaacagaccgtgcaagatggcaaactctacagaaacctcaattgtctcattggcggtt

SEQ ID NO: 30146 - DNA, 427 bp, Glycine max
  modified_base (312)..(312): a, c, g, t, unknown, or other
ggaaaaaaggaagaggaacgaagcaatcgcaagtcgtctgttctgtcccgcgggagcagacgacctgtcttcatcgccaaacaacctcaaaaacattcatcaacgttcactattaatccatccatcattaagtaagaaaataaggttcgatttttttatctttgttttgcttctgatccatcatggaggtgccgagttcctgggatgcccttcgcaaacaggcaagaaaacttgaagctcagttggatgagcagatgaattcttatcgtaaattggtttctaataatgtttctacaaaagctgacgctgcanagagtgatctagagtcttggatttgagcgttactaaaacaactgcaacaagtaaacacacagatgcaagcttgggtatcatctggtggttcagaaatggtttctcatactttgac

SEQ ID NO: 30147 - DNA, 321 bp, Glycine max
gatttcaaagggatataatataaagtaagcactctacttccttacccttttgccctgaacatgtatatataatatatatatataatattgtcttaatatttttgctacctttctttgtgcttcatcgtcaaccgtacggtaaagaaactatagccacctggaattctgtctctgacatggtcgatgatgacaagagaaataataatctacgacagctgctagtgatttgtctctgaaagaattaggagcttattttatttctagtgccatgaagagagcaagtgaatgggcttattctcatgagattccaagtgatgtcac

SEQ ID NO: 30148 - DNA, 317 bp, Glycine max
ggtttcaatgggatattatattgagactggactctgctttgttaaccttgagatctgagcatctatctctacgctagtatactatgatattggcccaatagctcgtgctacctatatttgcactttattgttaaactcacgagaagagctctcttggcgaatgcaatcatgcctgtgactgccaacgagcatagcccagatcctcagtctgaatatgctgtgaaatctgatgcatgtgaagggaagcccgatcatcaaatatgtgccactgcatgaagaggacctgaccctgatctgattgccattgcagaacgaat

SEQ ID NO: 30149 - DNA, 386 bp, Glycine max
  modified_base (292)..(292): a, c, g, t, unknown, or other
ggaagcaagtagtagaagaagaagagggtggagaatcaaaaatgggagaagagagagaagatccacagaagctaaagcgattagcggcagattcatacgactacgacaacgactctcgatggcccgattactggaacaacgttctcatccctccccacatggcctctcgtgacgacgtcgtttcccacttcaagcgcaagttctaccatcgctacgttgatcctgattttgtggtggagccaatgtctgttggtggcagttcatcccagccagtgcgttcatcaactacctnctcatcgtcgcccctgacaaataatcaacctcgtgcaagaagttctggatcaactaatagaacttcagggacatccacaactgcaggtccaggt

SEQ ID NO: 30150 - DNA, 351 bp, Glycine max
ggtctctctggtctacaatcaacgtctctgtctcggttcgggctacattcctgggatcagctggctatgcttttcaagggcaaaaaatgacagatgcaaagccagataaacccttgatggcatcttcatcgcgaaaccttcctgatttcaagaagtctgttaagttgaagtatgtcaagcttgggtatcattacctcatcacccatggaatgaacctctgactgtccccccttgtggtgctgattgcatcccagctatctaccttctccctacgagacttgtatgatctttgggagcatctacaatacaacttgatatctgatattctttgcttaactctccttgtttcct

SEQ ID NO: 30151 - DNA, 394 bp, Glycine max
ccagatgaactattgataggagagaatgacatcatggagcaaatattagtacaagggcactgcaaagatcaaagaacggcaatggagacagcaaaaacaatcattttcttgggacttcttgaccagactgaaatccctgcttcctgcaaaagtgcttttgatgttgcttgtttccgcatggaggagaggttatcatacaccagcacagaaaaggatatggtgcttttgcatcatgaagtggaaatagaatacccagatagccaaattacagagaagcatagagctactttacttgaatttgggaagactcttgatgaaaaaaaccacaactgccatggcccttactgttggtattccagctgctgttggagctttgcttttattgacaaacaaa

SEQ ID NO: 30152 - DNA, 399 bp, Glycine max
ggaagaaggggaagaagggaaaggtccattcaacattattgtcattcagagaagagaagaggttttgcatcgcatcgcacagagatgaattcaattacaagaagcggatcgcttagtatcatcctcgttgttttcttctctttgcacttcattcttggtttttccgacgactcatcacctgcttcaaaagatgctacaaagacagaacctcatgccggaagaagcactagtgctatagttatcattgtattaattgtgcttgtgttcttttctttgttctcctttgtactttttaagctgtggcggaagaagaaaagggaggagcaatatgctcgtcttttgaaattatttgaagaggatgatgagttagagcttgagcttggcctaagggactgagac

SEQ ID NO: 30153 - DNA, 354 bp, Glycine max
gggaacagtgaagagcagcaagagtcttattcatcttgatctgggggcaaggcaacccaaactatgacgtttcgtgtgttgctgttactggtggtgttggtggatgagattggcgcggactccgactatgccaaacgcgactaccacaggtctcccaagtcgtaatcctgcaataaccccttccaattggtgacagtggagagctcgctggactgtgaggaaggacatgttcacaatggcgttagtgccagatttgggtctgtgttgccggtcatacctgtcaagagtgttacaactgccgcaatattcgctaatcccatagactgctgttacaattcaacttcaaagttatct

SEQ ID NO: 30154 - DNA, 268 bp, Glycine max
cggacgcgtgggtggtcaacttgcgatggcatccatggcttcacttgatttgtttagtggaggggaacaaattgatgcccggaaacttcaagagaaaatgatggttgttcagaaggaaagggaggagaaacttgctgagattctgaaagatagactccaccagtatgttcaaggagacaaggagggttttattagtcaggccgatgctgaagcgacatatctttaatatggcaattacggagttgatatgctgaacacaattggctat

SEQ ID NO: 30155 - DNA, 369 bp, Glycine max
ggccgaggaaaagaaagaaatagaaaaagaagaaaaaaacacagcgtcctagatttcctcttctctgcttcggaagaaagagaaaacaaacaaaacaatggcgttcgcttctttcctcggcagagtcctcttcgcttctgtcttcatactctctgcttaccaacaatttaatgaatatggagttgatgggggacctgctacaaaagcactcagacctaagtttgatgcctttacacatcgggtgcattctcaagtgggctttcaaattccagagattaatctgaaatttttaattgctggggctattgctctgaagggtcttggaggggttcttttcatatttggcagctcttttggagctttgcttct

SEQ ID NO: 30156 - DNA, 318 bp, Glycine max
gggttcaatgaattaattcccagggagttaatatctatattcaatgacaaagagctggaattattgatcagtggacttcctgaaattgatttggatgacttgagagcaaatacagaatattctggatatagtggtgcgtcaccagttatccaatggttttgggaggttgttcaaggtttcagcaaagaagacaaagctagactgctgcagtttgtgactggcacatccaaggttcctctggagggatttagtgctcttcaaggaatttcaggtgcccagaggtttcagatacataaggcatatgggagttctgatcac

SEQ ID NO: 30157 - DNA, 382 bp, Glycine max
  modified_base (358)..(358): a, c, g, t, unknown, or other
  modified_base (370)..(370): a, c, g, t, unknown, or other
gataccaaaaacaaaacacaagccaagtgaaagtgagaaagaataaaaatcaaagagcataatgtcagggatcattcacaagattggggagacccttcatgtgggagggcgcaagaaggaggaggagcataagggtgagcaccatgctggagaatacaaaggggagcaccatggtgaacacagtagtgagtacaaaggagagcatcatggtgaacacaaagctggagagtaccatggtgagcacaagccagagcacaaagaggggttcctagacaaagtcaaggacaagatccatggtgagggcggcgccgccgagggcgagaagaagaagaaggagaagaagatgaaagagcatggncatgagcatggncatgacagcagc

SEQ ID NO: 30158 - DNA, 454 bp, Glycine max
  modified_base (361)..(361): a, c, g, t, unknown, or other
  modified_base (399)..(399): a, c, g, t, unknown, or other
  modified_base (402)..(402): a, c, g, t, unknown, or other
  modified_base (423)..(423): a, c, g, t, unknown, or other
cccacgcgtccggggagctgaccgtggaggagcgcaacctcctctccgtcggctacaagaacgtaatcggcgctcgccgcgcctcctggcgcatcatctcctccattgagcagaaggaggagagccgcggcaacgaggaccacgtcgccgtcatccgtgactaccgctccaagatcgaggccgagctctccaacatctgcgacggaatcctcaagctcctcgacacgcgcctcgtcccctccgccgcctccggcgactccaaggtcttctacctcaagatgaagggagactaccacaggtacctcgctgagttcaagaccggcgccgaccgcaaggaagccgccgagagcacgctctccgnctacaaagccgctcaggacattgctaacaccgagctgnctncaactgaccctatcaggctgngtcttgctctgaatttctctgtgtttactat

SEQ ID NO: 30159 - DNA, 375 bp, Glycine max
ggagcaagagtgaagagcgaagagaatggctcccaagggtttaatctttttggctgtgttatgcttctcagcactgtcactgagtcgttgtcttgcggaggataatggacttgttatgaacttctacaaggaatcatgccctcaggctgaagacatcatcaaagaacaagtcaagcttctctacaagcgccacaagaacactgctttctcctggctcagaaacatcttccatgactgtgctgttcagagttgtgatgcttcactgttgctggactccacaagaaggagcttgtctgagaaggaaacagataggagctttgggttgagaaatttcaggtacgttgagaccatcaaagaagctttggaaagggaatg

SEQ ID NO: 30160 - DNA, 417 bp, Glycine max
  modified_base (358)..(358): a, c, g, t, unknown, or other
ggaagtgcgaaggacaatgagtgttcggtccaaaaacttgaactctgtattctatgcagattcgtaccatcccattcaagctggcagcatcgacggcaccgatgttgttcctcacgataacgccgtttatcgcgctcaactctgttcctccatcggcctctatgacccatttggtgatcccaaggccactggagacccttattgcactctctttgtcgctcgtctctctcgcctcaccaccgaagatgatctccgcaaggtcatgagtaagtatggtcgagtgaagaacttacgcttggttagggacattgtgacgggagcttctcgtggttatgcttttgttgaatacgagactganagggagatgcgacgagcatatatggatgctcatcatttgattggtgatgattctgaaat

SEQ ID NO: 30161 - DNA, 216 bp, Glycine max
  modified_base (42)..(42): a, c, g, t, unknown, or other
ttggggttgttcttgataatatgtgccactcggcaggccaantgaaggatgctctacgtgtaaaccctttctatattgtgctctaacattaggctctatcattcatgctcgtcatgatatgcacaggatgagataaattacaatgtttatagtttgttgaaagatgaaagcttgattccgtttcttacagatcgtagcatcttgaagcaagtgtca

SEQ ID NO: 30162 - DNA, 396 bp, Glycine max
ggaagttcttggtaatatgtgccactcatcaggccaagtgagggaggctctaggggttaccctttctatattgtgctctaacattaggctctatcattcaagccgtcatgataatgcacaggatgagagaaatgacaatgttgatagtttgatgaaagatgaaagctgggttccgtttcttacagagcgagcagctgaagcagttgtcaacattcagattgctacccaatcagataaagtagtgaatcctgtagattcaagttctcaaaatgggcatctagatggtgattcacaagatgacattaaatggatggaaacgctactctacttcatcatctcatcattgaagtctgggagatcctcatatctgctcgacgtgcttgtgggacttctata

SEQ ID NO: 30163 - DNA, 379 bp, Glycine max
ggagcgaagaagatattagggtttttgagtgcggtgcggcgatcctagcactctcttctgcagctttcgccgacagcttcattcaccatggctgagcaaaccgagaaggcttttttgaaacaaccaaaagtgtttctcagctcgaagaaaactgggaagggaaagagacccggaaagggtgggaaccgcttttggaaatccattgggcttggatttaagactcccagggaagccatcgaaggaacctacattgacaagaagtgccccttcactggcaatgtttccatccgtggccgtatcttggctggaacatgtcacagtgctaagatgaacaggactattattggtaggaggaaatatctccattttatcaagaagt

SEQ ID NO: 30164 - DNA, 366 bp, Glycine max
ggagaaaagaggaaacgagaggagcattgcagaggtggggaacctggaatggaatctctgatccattttgtgtgttgaatttgattttgtattgttatagattacagatttggtgggcaatggatagggacaacaaatctcctccaccttcttctctttatgtgaaatcatcatcttcatccttcagccacgacgacataagcgccatgccggagaatccacccaagaacagaggccacagacgcgcccattccgagattataaccctaccggacgacctatccttcgacgctgatctccttcccgacgacgacaacgacttgctctccctctaccttcaattcgatcagctcgattcctcttcac

SEQ ID NO: 30165 - DNA, 321 bp, Glycine max
gtttccaagatcaaaccacaggcccagtgaaggggagaaggactaaaaatcaaagagcataatgtcagggatcattcacaagattggggagacccttcatgtgggagggcgcaagaaggaggaggagcatacgggtgagcaccatgctggagaatacaaaggggagcaccatggtgaacacagtagtgagtacaaaggagagcatcatggtgaacacaaagctggagagtaccatggtgagcacaagccagagcacaaagaggggttcctagacaaagtcaaggacaagatccatggtgagggctgcgccgtcgaaggcga

SEQ ID NO: 30166 - DNA, 433 bp, Glycine max
  modified_base (403)..(403): a, c, g, t, unknown, or other
  modified_base (420)..(421): a, c, g, t, unknown, or other
gaagacaaagtgggttgtgactgggtggggaaagagagaaagtaataatggaggaatcgttagggcagaaatggaagcagccagagttcgctttggcatcagtttccgacctctctttggctccttcttcttcggcttcgccgggaattgctcgcttcaactctgacggtctccaaattcatcaccaatctcaccagattccattcaatgttgatcctcgaactgttcagttattcaaggtgagtcctgttctatcggtttgcttggtggaaggatccgatgttggtaaaaagacattgtattccaggggagtcacaatccagtttagaaatgatgaggagagtgcagccttccattgtgtagttcaacagttggaagaagggaagtaatgctcaagaagganatggacgaaatggaacnntatacacttcta

SEQ ID NO: 30167 - DNA, 428 bp, Glycine max
ggacaaaactcgaagcagaaactgagctcaccaacacagttgcattattttctttccagatccaactcaaaattgcaatgggagtagaagatacagatatttgtatcatcaaggagccagatcatgttgtagtctattcagatggcatttcccatgattcaggtcatgaagctggaagtgatcatcacaatattacagagtcttatgaacaaatcaatgagactactgaacatcatagttcagaggagagtgcaaaggaatatgcggtgaaggaatgtacaacagaaatttctgttaaggtctctgatgtctctaatgttaaaaaatgtgaggataagttaacctcagattctgagggtgtcctcagtgagaaaagttttaaatctcacataacagggggtaaacatatgcacgagataccgggaaga

SEQ ID NO: 30168 - DNA, 433 bp, Glycine max
  modified_base (402)..(402): a, c, g, t, unknown, or other
gtcagaggaggttcctgttgaggagtcaaagaaggcaaatcctaaggaactgaatccatatttgaaggataatggaagtggatacccggaagaaagtggagctaaagttggtgccgaccaacttctatcttcttcccttgttggggatggaggagcaagttggagacttaaagccttaaagcgtgcacaagagcaagcagctcgagatggacgaagattcaatgaggttgtggaagaaaggtggggttctcttggtgagttgactgcagctgttgcatctcatgcagctgccccagctcgtgctcatctgcgtgctataaaaaatagacaaagagggataactgaagaaaattcacaagattctgataagcatggtcgaagggattctaaaagggactactntaaagatgtttctgttcggcaccatgaaatg

SEQ ID NO: 30169 - DNA, 318 bp, Glycine max
ggtgcacaagtgagtttgtgggatcgagatatctagaaacagtgtgatgaaaatgaaggtccttgttttcttcgttgctacaattttggtagcatggcaatgccatgcgtacgatatgttccctatccgaatgaacactggctatggtgcccgtactccggaggtgaaatgcgcaagttggaggcttgctgtgaaagcacacaacatctttggctttgagaccattcctgaagagtgcgttgaagcaacaaaggaatacatccatggcgaacaatatagatcagactccatatcagttaaccaacaggcttactttta

SEQ ID NO: 30170 - DNA, 360 bp, Glycine max
tgggtgtagttcagcaattgaagaaaggtatggatccgaatagtgtttatgaagatcttattgagattcatcggttccttgaccgcttctacatgtcaagaattggaatccgtatgcttatcggacagcatgttgagtttcacaatcccaatactactccccacgtcagagggttacatacacacgaaaatgtctactgtggaagaggcaaggaatgcctgtgaaaatgctcgttctatttgtctatcgtaaatatttaagtgccccttatgaacttatttagggagatcctaattttactttaccgtatgttccagctcacttgcatcctatggtatttgaattggctaagaacttact

SEQ ID NO: 30171 - DNA, 349 bp, Glycine max
  modified_base (210)..(210): a, c, g, t, unknown, or other
  modified_base (267)..(267): a, c, g, t, unknown, or other
ggcagtatggaagcccgctgaggccatatactcctgttgtggttacactatggtacagagcacctgaacttttgctgggtgctaaagaatactcaactgcaattgacatgtggtcagtgggttgcataatggctgaattaattgccaaggaacctctgttcaggggtaaaagtgaacttgaacaacttgataagatttttcgaaccctgngtacgcctgatgagaaaatttggccaggattatccaaattacctggggctaaagcanattttgtaagcaactgtttaatacactaaggaagaagtttccagctgcgtcgtttattggtttgccagttttatctgagctt

SEQ ID NO: 30172 - DNA, 422 bp, Glycine max
gacggctgagaaaatagcgacgcggatacacactcgtcttgacgatccagcgattctactctccgatgagtctttgcagggtgaagaatcgcgagtccagccgccggtgaagaatcacgcgattcgtctggaaatcgcgattcatccctgatacagagattcaagcacgattcaggaacaaaaacgagacaacctccgattcgtatcggtagcagctggaatcgtatcgaatcctgtgatacgtatcgtgaattgtacaatactaactatcatgatttaggctagtgctggagcttatttgactaggttatataatgttgttaaatagctgccaagtgctactgcattgccgaatttcttgaattcgcaatcaccacttcgtcaactattgcggtcgctatgggtgtcgtgggtacagaaag

SEQ ID NO: 30173 - DNA, 392 bp, Glycine max
ggagcaacaaaaaaattaaattcttatcatttacagaatatggagtcccagacttccacacgagagaaggagtctctcaatctcagggaagtcccagaagcagataaaaccttgggcttggacatggccaagggcagcgcattctgcaagatgggtgaaggttggacatgcatcataactaaaactgaggggcctgatgctggcaaagttttcgttaaatgtggtgaaaattgcacctgtaccattgagggcgaagcagtgtcccaagaattgaatttgccacctgatgttgtgagcagcagtggcagtggagcattctgcaagtgtggtgaaaggtggagttgtgtcattttcaggactgaaggccctgatgcaagctctggcaagggctt

SEQ ID NO: 30174 - DNA, 420 bp, Glycine max
gggccagaactgacagcactgtaccgtaagtcttgttatctccgaaagctttctaagaagagagagagagagagaggaaatgggtaaggggggaatgtcaattgatgaacatggagaaggcaaagaagagaatatggctgcttggcttgttggaatgaacactctcaagattcagcctttcaagcttcctactttgggactccatgatgtcagagttagaatgaaggctgttggtatctgtgggagtgatgttcactacctcaagacactgaggtgtgctcactttatagttaaagaaccaatggttattggtcatgagtgtgctgggatcatagaagaagttggtagtcaggtaaagagtttggtgcctggtgaccgtgtggcaattgagcctgggatcagttgttggcattgcaacca

SEQ ID NO: 30175 - DNA, 381 bp, Glycine max
ggcagagtaagagagaggaggtggacaaataaagctataatttttagaggggttaccaccctcaccttctgccaaaccaaacccacccttttctgtcttcaagctactatcgataaatcagtttaaatttttgtggggtagtaataattgtaccatattgaggtaccttaaaaaggatctggggtttgcatattttccttgcaaatctctcagctactttggcttggctttctgaattttggtttttcagtgctgagagctgaacaagaagatggggggtggaaatcaagaggcagtcaagcagctgtagaccctgatggaaaatgtggatgatgagcagctgaagaatacattccagattatgcacccaggttatcaaac

SEQ ID NO: 30176 - DNA, 383 bp, Glycine max
gggtgcaggtgggaggaaatagtcggggtctttttcgttccctgtaccaaacgaaagcagagagcgaaaaatggctttgaaactctcgtcactatctcttcactcctctctccgccaccagcaccctaattcgtcgcattcaaaccatcgcattccccttcgtttctttgcaccttcccttcctcccacttcgtgtctctccggcgcagcctcagtctccacatttcatcgcactctcttcgccgtaaccgttcgcgcacttcaaagccaagacgaaagcaaaagcagtgatgtttttgaagaagaagaaaaagacgaagaaatatcgaggcagggtgagaaaaaagaactcgcgaagcaaagcatatggagtcagattaagg

SEQ ID NO: 30177 - DNA, 433 bp, Glycine max
gatgaacttaaagatgcaatcaccaaagggcctaaaaagctatgaccttggtggtgttggtctaggaattgtggtggcccttgataaatcatcatccgaggaacaaggccatgtttgcacatcaaattcaaaccgatccgtaccaatcccagttactaaccaacgtgggtttcaaaagggtgtgaatgaaattcccgctggaagctccgaggattacacgtttgtgacataccatgtacctaacaacaagaccatcactaaggtttattatgatggcggtgaaggtggaattctaacacatggctactataatattaataataataacaacaacaacgttggtgttggtggtgttagaagaatcccaccaacgcaaactttaattgaagaagatgaacagtcatatcccacctcggattttctcagctcgtgt

SEQ ID NO: 30178 - DNA, 320 bp, Glycine max
ggtgttgaatgggtggaattggaaatcgaagtgaaaagaacggttgaaagtgaaagagtaagatgctattgcaattgcgctgctctcattctcaccacaaactgacacttgcctgcagttgaagaaagaatagaggatcgtggtcgatggcgtctgctagccttggaagtggtggggtcggcagttcgaggtctgttaatggtggcttcaggggttcttccagttccgtcgattggcttggcagagagatgcttgagatgaggttgagagaccccgaagacgatagagatagtgagcctgacatcattgatggtgtgggt

SEQ ID NO: 30179 - DNA, 439 bp, Glycine max
ggaaagatggaaaatataacagaacttgacttgagcgaatgtcccataacaaaactcccaccttcatttcgaaatcttactcggcttcaagagttggagttggatcatggacccgaaagtgctgatcagttaatggactttgatgctgccaccctcatttcgaacatctgcatgatgccagaactatatgatattagtgctcgccgtttgcaatggaggctattgccagacgatgctttgaaattgacctcagtcgtgtgttcaagcgttcattctctcactttggaactgtcagatgagcttcttccgctatttctctcatggtttgtaaatgtggagaatttacggctagaagggagtaaatgcacagtcattcccgaatgcatcaaagaatgccgctttttatctatccttattttgagtggttgcgatcgtcttc

SEQ ID NO: 30180 - DNA, 390 bp, Glycine max
  modified_base (377)..(377): a, c, g, t, unknown, or other
ggcgaggaagccacatagagacacaatacagagtgagttgttgctccttcgccacaactctctgccaacatgggtatctccagagattctatgcacaagaggcgtgccactggtggcaagaagaaggcctggaggaaaaagagaaagtatgagcttggtcgccagcctgctaacactaagctgtcaagcaacaagacagtcaggaggatccgtgttagaggtggaaatgtgaaatggagggcattgagattggatactggaaattactcctggggaagtgaagctgtaactcgcaagactcgtgtactagatgtggtttacaatgcctcaaacaatgagcttgtgcgtactcagactcttgtcaaaagtgctatcgntcaagttgatgct

SEQ ID NO: 30181 - DNA, 423 bp, Glycine max
acgacagaaggggggtataattgtgatatgtctagatgagcttcttcaaaaaggatatggggtggggtctggaatttcccttttcatagcaactaatatctgtgaaaacattatatggaaggcatttagtcccaccactattaacagtggacgtggagctgaatttgaaggtgctgttattgctctgttccatttgctgataactagaacagacaaggtccgtgctcttcgtgaggcattttaccggcagaatcttcccaacgtgacaaatttgcttgctactgtcttgatcttcctaattgtcatatacttccaaggtttccgggtggtcttgcctgtaaggtcaaagaatgctcgtgggcagcagggttcatatccaatcaaattgttttataccttcaatatgcccatcattcttcagtc

SEQ ID NO: 30182 - DNA, 439 bp, Glycine max
  modified_base (422)..(422): a, c, g, t, unknown, or other
acatcaaaatcataaaccaacactacagcacctgtagaggtttattttcttcactgttcacactattttctcctttcctttcacattatcccttccctttttttaaacaagccatcttgcttttgtttcttctcttctcatcaccaacacggtgtgtgtccttcatcctggattagagccacaaacataacacattccgctttgactttggaggctaagggcctaaggcaggttcccaatcactgtgatatcatggaatccccacaatccgttgtgtcaccattcaagagctctgtcttgggtgaagctgagaagtataggtctgatgttttcacacaaagctcgggtcctttgtctaaggacattgaagtcaatggaaaggaagctgccgtggttaatccagaggaatcccatcgtgttgntgatgtttacattcatc

SEQ ID NO: 30183 - DNA, 419 bp, Glycine max
ggaacaagaggaaaagaaaaacaaacaaacactggttgaggttcaacgaacgcacagagtcgatcatactgaaagtgattaagggccgagttgcatgagttgaatcggcggaaatgggagctagtcgaaagcttcagggcgagattgatcgtgttctcaagaaggttcaggaaggcgtcgaagtcttcgatagcatctggaacaaggtttacgacaccgataatgccaaccagaaggagaagttcgaggctgacctgaagaaggagattaagaagctgcagaggtacagggaccagattaagacatggattcagtccagtgagatcaaagacaagaaggttagtgcctcatatgagcaagctctggtggatgcacgcaagattattgagcgtgaaatggaaagattcaagatctgtgag

SEQ ID NO: 30184 - DNA, 382 bp, Glycine max
ggttctagtgtgtgattgtttgttgttgtaactcgttcttcttcttttgttgttctgtgtttgtgtttgttttttctctcacctgaaaatgtcttgctgcggtggtaactgtggttgcggaagctcctgcaagtgcggcaacggctgcggaggctgcaagatgtacccagacttgagctacactgagtcaaccaccaccgagaccttggtcatgggagtggcacctgttaaagctcaatttgagggtgctgaaatgggtgtgcccgctgagaacgatggctgcaaatgtggaccaaactgctcctgcaacccctgcacttgcaagtgaggtgttgggagagcaagcttcaagcagagatagcccttaattaggaataatgat

SEQ ID NO: 30185 - DNA, 426 bp, Glycine max
ggcgctcccagagaggaagcttagagagagagagagagagagagagagagaggagagagtattggcgcttcatcaagatgggtatttctagggattccatgcacaagaggcgtgccactggtggcaagaaaaaggcttggagaaagaagagaaagtatgagcttgggcgtcaggcagcaaacaccaagttatcaagcaacaagacaatcaggaggattcgtgttagaggtggcaatgttaaatggagggcattgtggctggatactggcaattactcatggggtagtgaagcagttactcgcaagactcgtattctagatgttgtttacaatgcctcaaacaacgagcttgtgcgaactcagaccctggtcaagagtgctattgtccaggttgatgctgctcctttcaagcagtggtaccttcagc

SEQ ID NO: 30186 - DNA, 437 bp, Glycine max
acagatacaattgttaacttgcattttcatggggtgccaatcgaagatctttgcttagattttacactccctggttatcctgaatacaccttgaagccaggagatgaaattgttgatatcaacaatttggaggagtatatatccttggtggcagatgcaactgtcaagactggaatcatgcggcaaatagaagcatttagagcagggtttaaccaggtttttgacatctcgtctttacaaatttttactcctcaagaactagataatttgctttgcggctgcaaggagttgtgggagtctgagacacttgctgatcatataaaattcgaccatgggtacaatgcaaagagccctgccattattaatttacttgaaattatgggagggttcacaccagagcagcaacgtgccttctgtcaatttgtactggtgcacct

SEQ ID NO: 30187 - DNA, 433 bp, Glycine max
gttggtgtggtagagataataagagaggatcatagtagtgctagaaattgaagtgtgtaatagaatagtgatagagagagagagatatggggagaggaagggtgcagttgaagaggatcgagaacaagatcaataggcaagtgacgttctcaaagagaaggtctggtttgctcaagaaagcacatgagatctctgtgcattgtgatgctgaagtggccctcatagtcttctccaccaaaggcaaactctttgagtacttcagcgatccctgtatggaaaaaattcttgaacggtatgagaggtattcatatgcagagaggcagcttgttgcaagtgatcaaccactaactgaaaattggactctggaacatgcaaagctgaaagcaaggttggaagtcctacagaaaaatcaaaggaattttatgggacaaga

SEQ ID NO: 30188 - DNA, 420 bp, Glycine max
gcgcgaagacagtgagaagaacatcaaatggagatatggtgctcctccaaattatgacgttgtcaacaaattatttgatgaaggcagaaccaaggtatggcctccgggttcacttgaagaaaaggtgcagactttagtgaagaattgggagatggaaatgttccacaaggaggatttcaaggataacagatcagtggacccagagaaatacactttcagcctaaacggaaggaagcctattagtttggaagagaaaaggaagcttggaggagggtatattccactgctgcaaacctctataccagagaaactgaggccttacaacccatatgaagaaacaacagattcatcccacaaggccttcacgacaaacattccacgtgggtttgcttttgaattctgcacgtgtactctggacca

SEQ ID NO: 30189 - DNA, 442 bp, Glycine max
  modified_base (351)..(351): a, c, g, t, unknown, or other
tcactactgacgtaatagctagctagctaatcatggaaatctttcaagccacagcagaaaagatggagattaatcccaagagatttacaacattattctttgttgtacttttcatatcatttcctgttgctttcatagtttcttcaatctatcgaaactcaagtttcgctattttttatgaggggttaacagaatcatcggctcaaaacgttacaaacaatggttttccgttgggaggaagagtccacaatactacatcggatgatgagattgagactcacttaagaacaagacacaatgataccgtgtcggtggtacgtaacagtttttctttttcgtttatataactgntgtattcttttgttctggactaaaactcactctacttccgtaataatggacttggcaaagttaaagtgttgcccggcaatattcaaaacgg

SEQ ID NO: 30190 - DNA, 401 bp, Glycine max
  modified_base (388)..(388): a, c, g, t, unknown, or other
gaggaaagtgagtgagagaaagagatcacatagcagaatggcttctactcaatgtttcttgcaccaccatgctcttaccacccctgccagatccccatcacaacgcatcatggttagcaccaagcctaaccagcttgtttgcaaggcacagaagcaagaggatattgatgtcagcccaatctctcgccggttagctctaaccgtgctcattggtgctgctgctgttggctccaaagtccaacctgctgatgcagcttatggggaagctgccaatgtgtttggaaagccaaaggcagacacagatttcctgccatacaatggagatggattcaaactatcgattccctcaaagtggaacccaagcaaagaggttgagtacacaggtcangttgttagatatg

SEQ ID NO: 30191 - DNA, 425 bp, Glycine max
ggttctagtgtgtgattgtttgttgttgtaactcgttcttcttcttttgttctgtgtttgtgtttgttttttctctcacctgaaaatgtcttgctgcggtggtaactgtggttgcggaagctcctgcaagtgcggcaacggctgcggaggctgcaagatgtacccagacttgagctacactgagtcaaccaccaccgagaccttggtcatgggagtggcacctgttaaggctcaatttgagggtgctgaaatgggtgtgcccgctgagaacgatggctgcaaatgtggaccaaactgctcctgcaacccctgcacttgcaagtgaggtgttgggagagcaagcttcaagcagagatagcccttaactaggaataatgataaactattaatgtgtagctaaaaacttatgtattatgtctgtgatg

SEQ ID NO: 30192 - DNA, 250 bp, Glycine max
ttttgctctgtgtttctatcgcattatctctcacctgaaaatatctcgctgcaatgccaactctgattgcagaaactcctgcaagttcggcaacacctgcagaaactgcaagatgtacccaaacttcaactacactgattcaaccaccacctacaccttgatcatgggagatgcaccatgtaaagctcaatttcatggtacctaaatgggtacacccgctgagaactatggctgcaaatgctgaccaaac

SEQ ID NO: 30193 - DNA, 377 bp, Glycine max
gatcacatagatgggaactggtgcatcgaaggacgcagaggaagggagcaaggaagagcgtgacaggctcgatcatgcaggtggccaactctacgtctctctcaagatggagaatcggaagctcacaggggaccttgttcctcacgtttatggctctgttcctcttgttggctcttgggatccttccaaagctcttttcatggagcgggaatcggtgtcaatgtgggaacttagctttgttgtcccacctaatcacgaaactttggatttcaaattcctgttgaagcctaaggacagcaatacaccttgttttgttgaggagggtcctagccgcctgcttgtggggggagcgttgcaagaggatgccaagcttgcgt

SEQ ID NO: 30194 - DNA, 425 bp, Glycine max
gggatagggaaggatggaacagagatcttcttcaaggatatttggccatccagtgaagaaatagcaaatgttgtacaatcaagtgtgctgcctgatatgtttagggacacatataatgcaatcacccaagggaatcccatgtggaataatttatctgttccaacgggcactctttatgcttgggaccctacatcgacttatattcatgagccaccttattttagagatatgagcatgtctcccccaggctctcatggagtgaaggatgcttactgtttgctcaactttggagacagtatcacaactgaccacatctctccagctggcagcatacataaggacagtcctgcggccagataccttatagaacgtggggttgatagacgggacttcaactcctatggaagtcgccgtggtaatgatga

SEQ ID NO: 30195 - DNA, 400 bp, Glycine max
ggtgtgggatgagaagatgatgaggaaacattggtagaagaaattggagagagagagagagagagggttggattggttttcttcttcctcttcctaaagagaatctaatctcaatcctcattacacacatatctacagatttcttcattcctctctcaatcttttctgttttcttttcccctctttgacatcctcgttttcgccgaaacaaaaacaactaagattttgttttttgttgtatttttcttcctgttgttatttgactcggttgtctgaatcagttgttgcagcacggtcgggagccacagctatgcagagccaagttgtgtgcaatggttgtgggagccttctgctttacccaagaggagcaaccaatgtctgttgtgcattgtgcaacaca

SEQ ID NO: 30196 - DNA, 341 bp, Glycine max
ggctagagagagaagaagaagttgttgggttgagttgggtttggattggatttctaatctaatctatacctttctttttcctatgcttttaaggcacaaatccttctcccttctctcttctttcttcttcttctcctgacccttattattattccttgcccttaccctttaggcaagggaaggaagaaagaataactatattattatctttattgtaatctatctttttattataattataattataattattgttgttattattccttaaatatggattcgccgtgtctctccaacgattcggtttctggattcaaagacaaggagtcaatggttgaccc

SEQ ID NO: 30197 - DNA, 397 bp, Glycine max
ggcactgcatagatggaaaaagcatggaaagaggcgcattgttagcaacgtgtggtctgctgttgcagcataaaacggagtagagcttcatcctctgctcttgcacactaagacccttctcttccttagcaaccccacttcttagttacacatccacatttgcttgtcttgtttaggtggttggtgagaatgtcagagacattcatattcacactttctctggttatgctatgtgctgcttcagcttttgcagcagttccacacaggttgccagaagtttacctcaagaatggtaactttgaggagaatccaaaccccaaatacctcaagaaaacgacactgattgggaaatatgctcttccaaaatgggagatcagtggtcatgttgagtatgtct

SEQ ID NO: 30198 - DNA, 381 bp, Glycine max
gaggcgaatgcaattacagaagaaccaacagaattttcatttcctcatttaacctcactgaatctgcatatgttgccacaactcagttgcttttatcctggaagatttacgctggaatgcccagccttaaatcatttagaggtgttgtcttgtgataacttggagaaatttcaaaaccaacaagaggcacaatgttctacttcagttactaagctaccccttttctccgaaggaaagactattttcattctggagtcattgaagctctattgggaaattgcaaggatgctatgcaacaaaaaatttctgaaggacatgcttcataaattagttgaacttgagctggattttaatgatgtcagagaggtaccaaatttcgtg

SEQ ID NO: 30199 - DNA, 440 bp, Glycine max
  modified_base (366)..(366): a, c, g, t, unknown, or other
gatgctcacttgcacaaactccacttgatatctcggaaacggtaacgtccaaattctggacataaccctcgacagtaaaatggtcgtgcttgccttcatctcgaaagtttgcaaaatcgaatcttttggtagagtagacacgaaaggtaacgaagccagtctcacaactccggcttttaccgtctctagcgaggacaacaagttcgtaaccgtagggtgcgatacctatggctatctcaacagctttaacaacgacatcaggtctcgaatggggtgcttcacaaggtgtgacaccatagagagtgtgcaaagcatgcaggaagatggaaagtgtacggggatagggtgttgccagatggatacctnctcgaatgaagaatattagcatacaagcattcagctattacaatttcaattactcttcggacttcaacaaatgc

SEQ ID NO: 30200 - DNA, 432 bp, Glycine max
ggaagtgaaagagagattctgcgtgcaggaagagcgaagcgagtgagtgtggcaatggcggaggagcaaggtgaattcaggatttacaattccatgactcagcagaaagagatcttcaaaaccaaagtccccggcaaggtttccatgtacgtttgcggagtcactgcctacgacttcagccatctcggtcacgctcgcgctgcggtttctttcgatatcctcttcaggtaccttaagcacttgggctatgagattacatatgtgcggaatttcactgatgttgatgacaagataattaagcgagcaaatgagaccggtgaggatccattgatgttgagcaaccgtttttgtgatgaatataatgctgatatggctgatctccagtgcgagacaccatctagggaacctcgtgtttctgaacaccttaacgag

SEQ ID NO: 30201 - DNA, 407 bp, Glycine max
gggggaaggaaagaaattagaaatatttattcattgtcaccaaatcttgttccctgcaagagaaagaaagaagggagagaagaagttgttgggttgagttggattggatttctaatctaatctatacctttcttttttcctatgcttttaaggcacaaacccttctttcttccctcttctttcttcttcttattgttattccttgcctttaccctttagggaaggaagaaggaacaactatactactattatccttattattgttattattgtaattaatctttttattatagttattgttgttgttattattcctcaaatatggattcgttgtgcctctccaacgactcagttgtttctggattcaaagacaaggagtcaatggttgacccctttttggtcgaggc

SEQ ID NO: 30202 - DNA, 269 bp, Glycine max
ggttcagattagggtaatccaacttccgaacccgaaaagtctacgcttttaattgtctgttgttttctctctcaaatcggtgctcccttcggcggcgcgtgagggtttccagcggcgcgtgagggtgttattcgcgcgttattccaagttcctcgctgacctatgctttgtccgacccacattggagagttcacgctcgagagaaaggcggaatctcactggacggtcgtgatttggcacctccatggcttccgccgtccttgctaatc

SEQ ID NO: 30203 - DNA, 425 bp, Glycine max
gaagctttgagatggtggacccttcaataggaactcaagagaacgaagatcatgctgctccatccaatgatggatcgaattctaacggaaatggggctggaaccagtacccgggataggtccgttcctatcttcgtttccgaccctgatgtccttgattgctgcatttgctatgaacccttgacttcccctgtgctccagtgtgagaatggacatattgcttgctctatttgctgtgtgagactcagtaacaagtgtcccatgtgttcaatgcccattgggtataaccgttgccgggctattgagaaggtcttggagtgtattaaaatgtcatgcccgaatgcaaattatggctgcaaagagacacttagttacagcaagaaaaacgaacatgagaaggaatgcatctatctgccatgttcatgc

SEQ ID NO: 30204 - DNA, 373 bp, Glycine max
  modified_base (338)..(338): a, c, g, t, unknown, or other
aggtgggagggggttcttctgtgttccatgtggggttcaaggatggctcttctgatagtgactcaagcgcgatcttgaacgaggagaacaacaaccacagccccaacaataacgcggcgatttcgtcgtgtggggttctgcaaagtcacgggcttttgttgtcgccttcttcgtcgtcgatgaacaactgtttccagttccagaaacagtaccagacgacgacgacgcactacgtaaagatggaggagcacaattttcttagcgccgacgaggcctgcaatttcttctcggatgaacaagcaccaactctgcagcggtactgttcaaaagaatggagntaaaaggaagaagcttaatgaggcttaatttattg

SEQ ID NO: 30205 - DNA, 421 bp, Glycine max
ggaccttggtgattcagggcttatacccttagagataaggtttttgcatgatcctgctaaagatacaggttttgtcggcagtgcattgacaagtaacatgatacgattttttaagacccaagatgaatcatggagccatgaggttgccatatcagtgaaaccattgaaagtgcaaaactggattcttcctgaaatgcctgggcttataactgattttctgatttctcttgatgatcggtttttgtattttgtaaactggcttcatggggatataaggcagtataacatcgaggacgttaaaaatcctaaactgactggacaagtatgggttggtggacttatccagaaaggaagccctgtagtagctataactgatgatggtgaaacatggcaagctgaagttccagagattcagggaaac

SEQ ID NO: 30206 - DNA, 404 bp, Glycine max
gagtgaaagagtgagacagatgtcgaaccgtgggcgtggtggttcggcggggaacaagttccgcatgtcgctgggtcttccagtggcggcgactgtgaactgctccgacaacacgggggcgaagaacctctacatcatttcggtgaaagggatcaaaggccgtttgaaccgtctttcctcggcctgcgttggcgacatggtgatggccaccgtgaagaatggataacccgatctgaggaagaaggtcttgccagctgtcatcgttcgccagcgcaagccatggcgccgaaaggactgcgtctacatgtacttcgaagataatgctggtgttattgtcaatcccaagggagaaatgaaaggttctgctatcactggtcccattggaaaagagtgtgctgatttgt

SEQ ID NO: 30207 - DNA, 309 bp, Glycine max
ggggctttggcctatgcaaccggtgctgattttgcgaaatacatgacagaattttacaagtatttggagatgggtctccaaaatttcgaggactaccaggtttgtgctatcacagtgggtgtggttggtgatgtatgcagagccttggaggagaaaatactgccttattgtgatgggataatgacccaacttcttaaggatttgtctagcaatcagttgcataggtccgttaagcctcctattttttcatgttttggagacattgccttggcaattggagaaaactttgagaaatacctgttatatgca

SEQ ID NO: 30208 - DNA, 383 bp, Glycine max
ggttgcataatatgatgacactagatgcattgccagtggccaagcggcagaggtttgctaaggagactttggagatttttgcacctttggccaatcgcttgggaatttctacttggaaggaacaattggaaaatttatgttttaagcatctcaacccaagccaccatgaggagctttcatccaagcttgtggaatcgtatgatgatgcaatgattacttctgcaatagagagattagaggaagcacttaaagatgaaggcatttcttataatgtcatttctgggcggcataagagcttatatagcgtttattgcaaaatgttaaagaagaaactaaccatagatgatatccatgacatttatgggctgcgcttgattgttgac

SEQ ID NO: 30209 - DNA, 409 bp, Glycine max
gaagcaaaggtgagttgggactacgagacaaggcgtaatttgtcgcatttagatgaaactcacaactttacttggcactattttttggtaaacaagatcaatattcgttaaagcagcatttctgcgccaaatctagttagtttccatcgccaatacaatacgacaccgcttaatgcaagtcctcgtcgtcgtttaacgctcacgttttctgttctctgagaaggtaaaaagcgttaaaacgcagcatctcaaacacgcgattccgaagcttttctgcgatcaatggagttcgacccgatcccaatcggttcgtgctccaaagaacaccagatgatctataaggagtggttcaattacgctgattcagatagcgatggccgcattacggggagtgatgccaccaagtttt

SEQ ID NO: 30210 - DNA, 394 bp, Glycine max
ggatgtggtgtggcattcttgtgaagagttctgcacttctgtctatatggatatttgttatcccagtgcttattgggcttctctttgagcttttggtcattgtgccaatgagagttccagtggatgaaagtccagtattcctcctttatcaagactgggcattaggccttatatttctcaagatatggactagattggttatgttggaccacatgatgccgctggtggatgaaagttggcgagtcaaatttgagcgagtgagagaggatggtttctccaggctgcaaggtctttgggtccttcgggaaattgtacttccgatcataatgaagctgttgacagcattgtgtgtaccctacgttttggccaaaggtgtatttccagtgcttgggta

SEQ ID NO: 30211 - DNA, 435 bp, Glycine max
gggggagaagggtggattgttagtgtggacgatttggaagatataattggggggcatgtatggttgggttccatttgtatacttggtggaatctggcatatcttaaccaaaccttttgcatgggctcggcgtgcacttgtatggtctggagaagcttacttatcttatagtttaggtgctttatctgtttttggttttattgcttgttgctttgtctggtttaataataccgcttatcctagtgagttttacgggcccactgggccagaagcttctcaagctcaagcatttacttttctagttagagaccaacgtcttggggctaatgtaggatctgctcaaggacctacaggtttaggtaaatatctaatgcgttccccgacaggagaagttatttttgggggagaaactatgcgtttttgggatttgcgtgct

SEQ ID NO: 30212 - DNA, 328 bp, Glycine max
taatctgatgacactagatgcggctccgttgccataatcagcggacgtgggctaaggagactttggagatttttgcacctttgtccaatcgctagcgaatttctacttagaaggaacaattgcaaaatttatgttttaagcatatcaacccaagccaccatgatgagctatcatccaagcttgtataatcgtatgatgatccaatgattacttttgcaatagagagattacaggaagcacttaaagatgaatgcatttcttataatgtcatttcttaactgcataagatcctatataaagtttatcgcacaatgttaaagaagaaact

SEQ ID NO: 30213 - DNA, 400 bp, Glycine max
ggcccaaattttttcatagcattttcagaggaacaatggcgggtagggtttcgacgtgcttcttcttcgtgtttgctctttctctccttcttccttttcagatctccgctgaggaatcatcggagaaagagttcgtactcacattggatcactctaactttcacgacactgtcagcaagcacgatttcatcgtcgtcgagttctacgctccatggtgtggccactgtaagaagcttgctcccgagtatgagaaagctgcttctatcttgagtagtcatgatcctccggttgttttggctaaaattgatgccaatgaggagaagaacaaagaccttgcatctcaatatgatgttaggggatacccaacaattaagattctgagaaatgggggaaagaatgt

SEQ ID NO: 30214 - DNA, 409 bp, Glycine max
  modified_base (346)..(346): a, c, g, t, unknown, or other
ggtctctgaagactgaagctctgacaaaaaaaaacaaaaaaggcttaccttagcgtgttatttgtttgacccggataagtgtgtgttcttatgaaggttgcagtgctatggagtctatagatttcatgctgcagcttcattagataccaattttggtgaatcatcttgatagcttgttcttggatttttgttttggggtgttgatgaagatgtttatgggtggccaaattttcggtgctggtgttattattggtagtttctttctgctgatcctctgtggcatggtttgtgggactgacagtgatatattctgcttgaaaagtgtaaagagaacacttgacgaccnctacaattatttgcaatcctggaatttcaataacaatacagaagggtatatatgcaagtttac

SEQ ID NO: 30215 - DNA, 428 bp, Glycine max
  modified_base (417)..(417): a, c, g, t, unknown, or other
ggaaccaaattctagctcctttcagctgcacaagagtctccgatcccaactctctctctctctccacttgccaaaggaaaaaggctaaagagaaacccacacacacacacacagaaatatgtcttccccaagcaagcgccgagagatggacttgatgaaactgatgatgagtgattacaaggtcgagatgattaatgatggaatgcaagaattttatgtgcaattccatggacccaatgacagtccttatcatggtggtgtgtggaaagtaagagttgagttgccggatgcttatccttacaaatctccttccattggatttatcaacaagatctatcacccgaatgttgatgagatgtcaggatcagtttgtctggatgttatcaatcaaacctggagccccatgttcgatcttgntaatgtgtttg

SEQ ID NO: 30216 - DNA, 371 bp, Glycine max
ggcacaagtgagtttgttgatcgagataactagaaacagtgtgatgaaaatgaaggtccttgttttcttcgttgctacaattttggtagcatggcaatgccatgcgtacgatatgttccctctccgaatgaacactggctatggtgcccgtactccggaggtgaaatgcgcaagttggaggcttgctgtggaagcacacaacatctttggctttgagaccattcctgaagagtgcgttgaagcaacaaaggaatacatccatggcgaacaatatagatcagactccaaaacagttaaccaacaagcttacttttatgccagagacctcgaagtccatcccaaggacacatttgtgttcagtatagatggca

SEQ ID NO: 30217 - DNA, 425 bp, Glycine max
  modified_base (356)..(356): a, c, g, t, unknown, or other
  modified_base (386)..(386): a, c, g, t, unknown, or other
ggaagtgaaagagagattgatttgactatgagcatgcagtgagtgtgatcaataactctacccattgcttcaaattcaatatgctttttggtttcgtttcgtctcggcttgtctttcactttctcaaccacccaacacaacacaaattccctttcttcttcttcttcttcttctaaatagatagaaggaatttagattaattaaaacaacctttcattcattctgttgtgttgggaaatatgatgttcgactttgccaggatttggacccgaaacacgttaataggtctcggcttgggtcagtttctttctcttctcatcacttccaccggcttcacttcctctgaattggctaanaaaggaattaatgctccaacttcacagtcngttctgaaaatatgtgtcttgacgcttgtctatggaact

SEQ ID NO: 30218 - DNA, 376 bp, Glycine max
ggagcaagagtgaagagcgaagagaagggctcccaagggcttaatctttttggctgtgttatgcttctcagcactgtcactgagtcgttgtcttgcggaggataatggacttgttatgaacttctacaaggaatcatgccctcaggctgaagacatcatcaaagaacaagtcaagcttctctacaagcgccacaagaacactgctttctcctggctcagaaacatcttccatgactgtgctgttcagagttgtgatgcttcactgttgctggactccacaagaaggagcttgtctgagaaggaaacagatagaagctttgggttgagaaatttcaggtacattgagaccatcaaagaagctttggaaagggaatgc

SEQ ID NO: 30219 - DNA, 414 bp, Glycine max
gcacaaaggatggaaactctggggaggacttcagtgaagattctattgagcgcgatgaaaggcgtctcacagaattaggtcgcaggactttggaaatatttgtccttgcccatatattcagcaataaaattgaggtttcctaccaggaagctgttgctctaaagagacaagaagagctcattcgtgaagaagaagcagcatggctggctgaatgtgagcagaaagcaaaacgtggaaatgagagggaaaagaagtcaaagaagaaacaggccaaacagaaacggaacaatcggaaaggaaaggataaaggtagagaggagagacctattgtggctgtatatgacaagcagcaacacaatcctgctgatgagaaaaaggattctaacatggaagaagttcaagctcttgatgaaa

SEQ ID NO: 30220 - DNA, 349 bp, Glycine max
ggcgtcgcaacacaagaagagaggagagcgttttccttttctttttaattttttctttggttaagcttaagcaacaaccgtcaccaagcacacgcgcagacgcaagctctttaaacggtggagaacgtgaactgaaccacttcaaagttcaaacccagattttgcaacaaaataagcacgccacaactcacctccactttgcttgagggttatattctattctatataaggggaagctcaacttcttcctccttgtcgcatacatagatacatgggttcggcaccagaagtgttggctcagagaagttgtggaaagctcattgggactcggttcctacagtacttgaat

SEQ ID NO: 30221 - DNA, 437 bp, Glycine max
  modified_base (423)..(423): a, c, g, t, unknown, or other
gattgaatcaatgactattcatgattccataattgaatcaattacatactggatccaagctaaaggaatgttatggtaaaacttcgtttgaaacgatgtggtaaaaagcaacgagccgtttatcgaatcgttgcaatcgatgttcgatctcgaagagagggaagagatcttcggaaagtgggtttttatgatccaataaagaatcaaacctatttaaatattcctgttattctatatttccttgaacgaggcgctcaacctacaggaactgttcaggacattttaaaaagggctggtgtttttatggaacttagctcgaatcaacaaacgaaattccattaatgaaataaaaaaaagggggtgtggatgacttgtatatagatttctaaaactcttttctcttttatccccccgctctcttgntctattcataccta

SEQ ID NO: 30222 - DNA, 404 bp, Glycine max
  modified_base (335)..(335): a, c, g, t, unknown, or other
ggaaagaaaaaggaatgtagtgtgtgtgagtgagtaacagattctaaacgctattgagagtaaaatggcggattcagtgtcggtggacatggaagccatctctcctccacccgaggaacatgttgttagaactcgtcatggttgtgtctcagttgctgtgtatggggaccaggacaagccagcgcttatcacgtatcctgatttggctttaaattgggttattattttgtccagaagcctgttcattgctgctccacaatttctgcatatatcatattagtccacctgggcatgagttgggagctgctgccattgatccagatgatccaattctntctgctgatgacttggttgatcaaatagctgaagttctaactattttgtcatagtacagttatgtgtat

SEQ ID NO: 30223 - DNA, 439 bp, Glycine max
  modified_base (433)..(433): a, c, g, t, unknown, or other
ggaagaaagttgttttgtggtggatgagtactgagtagtggtgccttattgtgggtggagagttccaaagggatcgcattgatctaattcttgtagatgtttacacttgcaagctttgcatgcaattcctggattcagatgtgattcagtggttcacttattggatcatgcgatcccttaggaactttccatcaactctaaacatcttgttgatccatttgagccaaccataacttcaatgtcctgcagtctccactggcagatctcgatgattgccaagctcaataaaataagacaaattaatattattgaaattgtccatatcatatttcactttctatcgttaggttagtccataagctagaaatgagtaaaatatatagtttcacagcaatatcatctcttcattccattagagtggggaagaagtggngaaagg

SEQ ID NO: 30224 - DNA, 429 bp, Glycine max
ggaccagaaatagatatgtggagtgcaggagtaattctctgcatcttattgtgtggagttcccccattttgggctgaatccgagcaaggagttgcacaggccattcttcgagggcttatagatttcaaaagggaaccttggcccagtatttctgaaagtgctaaaagccttgttaggcaaatgttagaacctgaccctaagcttcgattaactgccaaacaagtgcttgagcatccctggctccaaaatgctaagaaggctcctaatgttccacttggagatgttgtcaagtcaaggcttaagcaattttcgatgatgaacagattcaaaagaaaagcccttagggtcattgctgatttcttatccaatgaagaagttgaagacatcaaagatatgttcaagaagatggattatgataatgatggcatt

SEQ ID NO: 30225 - DNA, 439 bp, Glycine max
gaagaagaagaaggttggttgattggtcccattgattccgaagagaaaagaaaagatgtttgagccacaacagctatacactcgcgcgaagaccgaggaattcgacctcgaatcaggagaaaccctctacccagggctgagcgtcggcgagaaccagctccgatggggtttcatccgcaaggtctacggcatcctctccgcgcagatcgtcctcaccaccctcgtctccgtcaccaccgttttctatactccaatcaatgacctcctcaagggcaattccaccctcctcctcatcctcctcttccttcccttcatctttttgattcccctgttgaagtaccagcagaagcatcctcataattacatcttgcttgcactcttcaccgtgtcgatcagttccaccatcggagtcacctgtgccaacaccgacgggaaaatt

SEQ ID NO: 30226 - DNA, 412 bp, Glycine max
ggttcaatagaagactaattgggtagtgtcaatggaagaaatggagaggatatttttccgtcttttgggactaggcattgtgggagataaacttattgttgaaaagaaaccttaattgcggtcacccctagcccgtggactagagaaatgctaggaatacactttattctattggttgaaatttattgaaaattacaaaattttgtggattttacatcatatttaatgtacctctcctgatttttgtactttccaatagattttaactaaggggagagtgtgtgttagagagtgtgttcccagcactcctcttgtggcttaagagttggttgctagtgtcttagaaaggaatacctacagaaggctgattagaaaggctgaatgaagtgtcatagtttgtctcgatacctat

SEQ ID NO: 30227 - DNA, 436 bp, Glycine max
ggtggcaggtgtgggttcttcaattcattctaggtctggattccgactagccgcgttgactcggttccgtttttcattctcgcggatctaatattaaggaatagcttaagggcacattacaatgaaggcattgattctggttgggggatttggaacaaggctgaggccactgacactcagtttccctaagcctcttgttgattttgctaacaagcctatgattttgcatcagatagaagcccttaaggccattggagtgactgaggtagtgctagccatcaattaccaaccagaggttatgttgaatttcttgaaggattttgaatcaaagctcggcatcaagatcacatgttctcaggaaactgaaccactgggaacagcaggtcccctggctcttgctagggataagctgatagatgattctggagaacccttt

SEQ ID NO: 30228 - DNA, 416 bp, Glycine max
gaaagcaagtgtgctcttgtgtacggtcaaatgagtgagccccctggtgcccgtgcccgtgttggtcttactgggcttactgtggctgaacacttccgtgatgctgaagggcaagatgtgcttcttttcgtagacaacattttccgttttacccaagctaactcagaggtgtctgctttgcttggtcgtatcccatctgctgttggttaccaaccaaccttgtctactgatcttggagctcttcaagagcgtattacaacaaccaagaagggttcaattacctctgtccaagctatctatgtgcctgctgatgacttgacagatcctgctcctgctaccacttttgctcacttggatgccacaacagtgttgtcacgacagatcttcgagcttggtatctatcctgctgttgatcc

SEQ ID NO: 30229 - DNA, 399 bp, Glycine max
gatctcgaaagcgtgagaagaataatatcaggattcgtggagaaagaaaatggcaacgcggttttcaccacggccgagttcaaagagccttgctccgctgcgatgcagcgcgtcgtgaaaaccgtcgatgcctacctctctgagatcgccgcatacggcgatctcagcatctcgaagttcaacggcatcgctactcttattcctaaaagcgcgcgtaagatcgacgacgatctttaccgcgccgttgatatctatctcaaggcgcatccacagttggatgagatagagagagagaaggtgtgcagcgtgatggatccgttgaagctttcatacgaggcgcgtgtgcacgcgtcgcagaacaagcgattgccggtgcagattgtgctgcacgcgctttac

SEQ ID NO: 30230 - DNA, 281 bp, Glycine max
gacatacattttctcttcgtctggctcaaacaaaagaagagttacacccacaagttcgacaagatctgcaagcttgtatcctacccaccctaagtcactggtcatgttcaacaaggtaaaattaccaaactgaccggagttaataccaaggagctcttgctctggatcacgctcacttatatctatgtttatgaccctaccactcgcaaaatcacctttaagacccctgtcggcctattcatgaattttccattcttccctttcgagattcacaatgagcc

SEQ ID NO: 30231 - DNA, 357 bp, Glycine max
ggctaaagagagtgtgaagatgctaaagacataaacataagaaagagcacaaaacaaaacataaaaaaggcagtgcgagtggagtgaagtgaagtgagtgagagaagcgcaaacaagtagaagagaaaatcatggcagtttctgtaaccattttagttctcatcatcgctctgcatctcatagccttcgtctttgccattggggccgaacgacgtcgtagcgaggccaaagtggtccccgacgagtacgacgaccgaaccttctgcgtttacaccaccgacgctttctccgtctacggcctcgccgccgtcgcccttctgctcctcagccacaccgtccttaacggcgtcacccgat

SEQ ID NO: 30232 - DNA, 317 bp, Glycine max
  modified_base (248)..(248): a, c, g, t, unknown, or other
  modified_base (259)..(259): a, c, g, t, unknown, or other
ggcacaagtgagtttgttgatcgagataactagaaacagtgtgatgaaaatgaaggtccttgttttcttcgttgctacaattttggtagcatggcaatgccatgcgtacgatatgttccctctccgaatgaacactggctatggtgcccgtactccggaggtgaaatgcgcaagttggaggcttgctgtggaagcacacaacatctttggctttgagaccattcctgaagagtgcgttgaagcaacanaggaatacatncatggcgaacaatatagatcagactccaaaacagttaaccaacaagcttacttttatg

SEQ ID NO: 30233 - DNA, 398 bp, Glycine max
gacagaacacaacacaaacacagagaaagagagtgaataaatccagcattgttctgttctctgcaacattctccactctcaaccatggcttcaaagcttttactcatcactgtcttcgtttttgatttgattgcttttggacttgccgtggctgctgagcagagaagaagcaccgctagtgttgtgacggacaatgaaaagaattataattgctgtgtctataactctgatatagcaactggctatggtgttggagcatttttgtttctcttggttagtcaagtcctgataatggtggcaagtcgatgcttctgttgcgggaagcctcttaaccctggaggctcaagggcctgcgcagttgatcttttcataatctgctgggtggttttcatcatagc

SEQ ID NO: 30234 - DNA, 432 bp, Glycine max
  modified_base (346)..(346): a, c, g, t, unknown, or other
  modified_base (367)..(367): a, c, g, t, unknown, or other
ggaggaaaaggaaaggaaagggaagccaaagcgaaaccctaaccctaacggagagatggcggagcacttggcatcgatattcgggacggagaaggacagggtgaactgtccgttctacttcaagatcggcgcgtgcaggcacggcgaccggtgctcccggcttcacacgaagcccacaattagcccaacgttggttctgtcgaacatgtaccagaggcccgacatgaacatgaacatcatcaccaaccccgatcagccccagccccaatctctcgaccccgataaggtccaggatcacttcgacgacttctacgaagatctctttgaggagcttagcaagtacggncccattcagagcttgaatatntgcgacaacctcgccgatcatatgggtggaaatgtgtacgttcagtttagggaggaagaccatgc

SEQ ID NO: 30235 - DNA, 436 bp, Glycine max
ggaagaaggaagcatcataaccggccaaagctgctctctcttccatttatcccccataaataaaactaggtgaaaaaaatatactctgtgcttctcatgatgatagtgtagctgaagctgcttctgctgcagcattggtgatttggacacaaaaaaagtttcaaacttttcagttctctgagcttctggtttatcaattttgaaggagttcaatactttaccctattagttggttccctgaaatttgtattggtattgctgtatcagaaattcttctgaacaatctctttaatcaaccatgtcattattggctaaactacgctgtgtcaccatagatgttactggtaccctaatggcttacaaaggggagctcggtgactattattgcatggcagccaaagctgcaggcaaaccttgcccagactacaaacgtatg

SEQ ID NO: 30236 - DNA, 396 bp, Glycine max
ggagtagcgatggagaagaagaagggtgagctaaagtcaattgtccttcctttcctttccactagtcacataatcccgctagtggacatggccagactcttcgccttgcacgacgtcgacgtcaccatcatcaccaccgcacataacgccaccgttttccaaaagtccatcgatttagatgcgagtcgcggtcgccccatcagaacgcacgttgtcaacttccccgccgcacaagtgggtctccccgttgggatcgaagccttcaacgtcgatacgcctcgggaaatgacccccagaatctacatgggcctatcccttctccaacaagtcttcgaaaaactcttccatgactttgcaaccgatttcatcgtcaccgacatgttccacccttggagt

SEQ ID NO: 30237 - DNA, 433 bp, Glycine max
gacaattgatttgaggaaactgaatatgggtgagccttttgctcaaggagcttttgggaaactttaccgaggtacttacaatggtgaagatgttgcaatcaaaatcttggagaggcctgaaaatgatccagcaaaggctcaattgatggaacaacagttccagcaggaggtcacaatgttggccacactaaagcattctaacatagttcgtttcattggtgcatgccgcaagccaatggtatggtgcattgtaactgagtatgccaaaggtggttcagttcgacaatttttaatgaagcgtcaaaaccgctcagttcccctcaaattggctgtcaaacaagctttggatgttgcaagggggatggcttatgttcatggccttggatttatccacagggacttgaaatctgataatcttttgatttttggtgac

SEQ ID NO: 30238 - DNA, 416 bp, Glycine max
gacatacaaaccggcttcgtctggctcaaacaaaagaagagttacacccacaagttcgacaagatcggaaagcttgtctcctacgcgcccgaggtaactgctcatgtgcaacaaggtaaaattaccaaactcaccggggttaagaccaaggagctcttgctctggatcacgctcagtggtatctatgttgatgaccctcccactggcaaaatcaccttcaagacccctgccggcctatttaggtcttttcctgtctccgctttcgagattcaggaggagcctgaggctaaggacactactaagcgcgtgccggataccgctgagcctgtgcaagtcaaggaactctgattttattctcaaacaaggtcgccgtggtggttagcgtgcaaaatatatttatatatatgtttattaat

SEQ ID NO: 30239 - DNA, 416 bp, Glycine max
ggaggcatttctggcacagttttttccacttttattttaactttaagactgcacagagagaagcatataattcctgagtcaatatagaatttgtgaagtcagtccaaacttcagtttcaaagatgcctcgtggaacgcttgaagttgttctgatcagcgccaaaggaatcgatgacaatgattttctctccagcattgatccttatgtgattctcacatacagggcacaggagaaaaagagcactgtgcaagaagatgctggatccaagccacaatggaatgagagctttcttttcactgtctctgacagtgcatctgaacttaatctaaagataatggataaagacaactttagtcaagatgattgtcttggcgtggcaaccattcatctggatcccagtgttgaaagcggtagc

SEQ ID NO: 30240 - DNA, 386 bp, Glycine max
ggagagtgagtgagttaatatgttatcattgttatggtgaaagtgaaaccaaacaccgaagctgttgagtgattttcattgatccagatcgtgtctgttctacgtacgatgtacagcggctccagcgacggcgaaagccatgacgcccctcagagtcagaggaaaattccgccggcatcctccatgctttgggtccgcaatcttcgccgtttcatcggatccggcgccggcctcggatccgaagccttgatggagcttgaaactaagagaattttgctcgacatttttaaggaaaagcagaagaaaaccgccgaagctgctacaattcccactttctacaagaagaaacctgaagatggatcaatcagtcatagagttcagagatt

SEQ ID NO: 30241 - DNA, 425 bp, Glycine max
ggaggcaaaggtgcaaaagaaggaaagtagttcagatgattcttcttcagaatctgaagatgagaaacctgcacccaaatctgctgttctttcaaaaaagatacctgctaagaatggtgctgcccctccaaagaaaggcaagctcgcctccagttcttctgaagatgactcctctgatgaggatggtgtgcgtgcaaagaagccacagaaaatggttgctgagaaacaaaagaatggagcaactgtgcaaaagaaaaaggtggaaagtagttcagatgattcttcttcagaatctgaagctgagaaacctgcagtaaaagctactgtaccttcaaaaaagacacctactaaaaatggcaatttaagtaccccagcaaagaaaggcaaggcagctagcagctccagttcttctgattcatctgaag

SEQ ID NO: 30242 - DNA, 324 bp, Glycine max
gagagaaagaggagtagtactagtgataaggtgatcataatagagcataatataagagagtgaaaactcatggaggttggcctcaacaagaaggagaacatggggtttgaggaaactgagctaaggcttggactgcctggaaacgtaggaggcactggcactgaagaagtgctcatcaggaagagaggtttctctgagactgaaactgaaactgaggaggatgagtctgctaccactgtggatttgatgcttaatctttcttctaaggaagctgctgctgctgcagatacaactgataagcacaagactttgcctaaggagaag

SEQ ID NO: 30243 - DNA, 392 bp, Glycine max
gtgagaagccttgacttctctgcgacaggcatatcgacaatagtgcaggtgaacgaccttaagaactctcctgggcttggcaagagggagctgaggcaggccaccaatcaggtccttcaattgtttcaggataactaccctgagtttgtggccaagcagatattcatcaatgttccctggtggtaccttgccttttctaggatgatcagccccttcttcacacagaggaccaagagcaaatttctctttgctggcccatccaaatctgctcacacccttttccaatatatagctccggagctggtgccggttcaatatggtggacttagccgagaggctgaacaggaattcaccacttctgatcctgtcactgaggttacaatcaaacccgc

SEQ ID NO: 30244 - DNA, 367 bp, Glycine max
ggactcaaactgctcctgcaacccctgcgcttgcaagtgaggtgttgggagagcaagcttcaagcagagatagcccttaattaggaataatgataaactattaatgtgtagctaaaaacttatgtattatgtctgtgatggttttcgtgcactctggtgttttgtgttaaacaaacatccttagaataaagtggtcatgtcttgcctttcagcaagttcaagtgttttggacttgtgatgggtgtgttaagctcatggttgcttctcttttttttttttttaatgtttggtaattggtcgcttctgtataaagttcggctaatctgaattatgaatctctgcttataatattaaatactattactgc

SEQ ID NO: 30245 - DNA, 421 bp, Glycine max
gactcaagtgaagagaaagagccttccaaaatggtcaagctatctcgcatgctccctctcacttccacttccaggcataggctgttggaagtgctgtcctctaggaaagttgaagtcggagaccgtcttagccattcagctggcatttctactgctacaaataactatgctgccaaaggatatgcttccgatcgaatatttgctccttatactgtttacaagggcaaagctgcattctcgttgatcccttgtcttccaactttcactaagttgaattctgggactgttgtagttgatcgacgtggttcaatcatgatgactttcatgcattctattggagagcgcaaatatgactgggagaaaagacaaagatttgctctctcagcaacttgagttggttctttgataacaatgggcgctc

SEQ ID NO: 30246 - DNA, 430 bp, Glycine max
ggttagacgagggtaaggtcgcgttgtgttgcgtcgtgtcgtgcgctgttcctctgtctgtcgtttttgttttcagaccaaaccctagctccgcatcgcaaccatgtcgaccaagcaaggtggaaaagctaagcctttgaagaaacccaagtctgataagaaggattacgacgaggttgacatggctaacattcagaagaaaaaggaagaggagaaggcgctaaaggagttgaaagccaaggcgcaacagaagggaagctttggaggttctgggctcaagaaaagtggaaagaaataagggctctttatcatgattgtatacatccaatattgagccctgtagtttattaccatgataacttctgtcttattgtggccttctttattgctctaatgttagtactgaactgaggtatttcgtgatgtaagc

SEQ ID NO: 30247 - DNA, 419 bp, Glycine max
ggcatgagtttgttgtgagctataagctagtttatcgtgaggagaatatgaagttgtttgttttctttgttgctgcagtagttttggtagcatggccatgccatggcgcaggctaccaaaggttccctctccgaatgaaaactggctatggtgagcgttcttcggaggtaaaatgcgcaagttttaggcttgctgtggaagcacacaacatccgagcctttaaaaccattcctgaagagtgcgttgaaccaacaaaggactacattaatggcgaacaatttagatcagactctaaaacagttaaccaacaagctttcttttatgctagtgaacgcgaagtccatcacaacgacatatttatattcggcatagataacaccgtactctctaatatcccatactatgaaaaacatggatat

SEQ ID NO: 30248 - DNA, 422 bp, Glycine max
gggattaaagattaaaaaatgccgcccagtgcttgaaaaatgaagcagcagcagtggcagaagatgttcgacctttaactccgtggcaaactgtatataaacgcgtgaactgcaccttttttcgtcctattttcttaccataagtattcaattcaatgcttcatcctcatctattttctattgcattcgtacctcgctttgttttcgctattgctgttgatgctgttgctgtgtctcttgagtattgtctcaattgagttggtgttgaatccgagcttatttaggcacgtttattttagctggtgtgaaatcatttcaacattatctggaagaagactttcagatttttagtcaaatttaatacttaaagatggggttatatgagcatccaaatgttgtgcagtggggtattaaatctttca

SEQ ID NO: 30249 - DNA, 386 bp, Glycine max
aattcagatgttattacgcaaattccaatggtaaaagcatacaatcttcatgcaggtgccactgttgttagaggacccgggtttacaggtggtgatatcctgagacgaacaagtaatgggatggtcgtaacactaagagtagatgcctctgcagtaaggaaccaacgatatcgcataagattccgttatgctgcaacatcaaatttctattttgtcgtaaggcgtgggaatcttggtgttaatggtcgagagatcatgaaaacaatgagtacaggcgaggaattaaaatctgcatcttttgttttgggagagtttattacgccttttaatttttttgaaaatcaggttccacttcaaatagaaatacaatcactttctcctggggg

SEQ ID NO: 30250 - DNA, 401 bp, Glycine max
ggagcaagagtgaagagcgaagagaatggctcccaggggttgaatctttttggctgtgttatgcttctcaacactgtcactgagtcgttgtcttgcggaggataatggacttgttatgaacttctacaaggaatcatgccctcaggctgaagacatcatcaaagaacaagtcaagcttctctacaagcgccacaagaacactgctttctcctggctcagaaacatcttccatgactgtgctgatcagagttgtgatgcttcactgttgctggactccacaagaatgagcttgtctgagaaggaaacagatagaagctttgggttgagaaatctcaggtacattgagaccatcaaagaaactctggaaagggaattcccagaagttgtgtcctgcgctgata

SEQ ID NO: 30251 - DNA, 361 bp, Glycine max
gacagagagaatgagtacggtgggagaagggaaggtgagtagtaatggtcatggatgttgcaaatcagggccaggctatgcttccccactggaagccatttctggtcccagagagtctctcatttatgtaacctctgtctacacagggaccggaatagagaagccagactatttggcgacagtggatgtggatccaaactcttcaacttattccaaagtcatccataggcttcctgttccttatttaggtgacgaattgcatcacacaggctggagttcatgcagctcttgccatggagacccctcagcagaccgacgatttctcatcgtacctgcactcgtatcaggtcgagtatatgtg

SEQ ID NO: 30252 - DNA, 380 bp, Glycine max
gaagcagaagctgaagaagaataataagcagtatgaggacttgattaataagtgcagggagaaccctgagagcgaggaggaaaaagaagaagaggagagcgatgaagagtatgacagtgatggtgagattattgatccggatcagcttcaaaaacccgaagcaaaatctgattcggaagcctctcaatatgaagatgaaaagccagatgctggtgaaggtccttgggaccaaaagcttagcaagaaggacaggcttttggatagacagttcatgaaaaaccctagtgagatcacgtgggatgcggttaacaagaagtttaaagaggttgtggctgccaggggaagaaagggaactggtaggtttgaacaggttgagcagc

SEQ ID NO: 30253 - DNA, 428 bp, Glycine max
aggggacatcgaggcaaaaaatgaaaacccaaagtgcttctctcctctgtctttttctctctcttgctatccttttggctagtggcactgctgcaagtgcaactccaagaagcgcagtgccaagccaccatgtttcaacattcaacagaagcctttttccttccacttttctctttggaattggttcttctgcttaccaggcagaaggagcagcaagtgtagatgggagaggaccaagcatatgggacacctacactagacagcatactgaaaagatttgggatcatagcaccggggacatgggagctgatttttatcatcgatacaagggtgacataaaaatagcgaaagaaattgtgctggactctttcagaatctctatctcatggtcaagaatatttccaaagggcaagggaagcagtaacccc

SEQ ID NO: 30254 - DNA, 366 bp, Glycine max
gatttgaaagggtcaattaaaagcaagggcttggtcactcctatctatatctggtctcacttaatcttgagttgtctaaccacacatcacacttgaacggagagataacaatggctcctgagaaggccgagactgatattgcatagaattacttataaatggaaaaggatgaggaaggtactaagtccaccagtggccaattgtctaggctatttcaccatgctggctctgtctatgatgcaatgattcagctgtgctcataattaggtagcacaagtgttactgacactaccatattccttatcacaactgcctgatgaactctgtcatcataaatactttcagatatttactcaaatttaatac

SEQ ID NO: 30255 - DNA, 444 bp, Glycine max
gatcttgaaatagtgttcaatagaggtcgagttcgtattgccacatggaacaagactctattggcatcaaatttacaaccatctagtgagagctgcgggaatgccggatttctgatgttcaactcaaaatttcttaaaccaaatggaagcaagttattgagcaatcaaaatcaacatatcatcacccatggtgagagaaacattgttactgaacacacaacacaacttgcttgtgtttttaccgaagaagtgtgtggagatggagattgggctcatggaagttttccgcttgaggaatacattcaggctctggatcgttccaaagatgagatgtactataatcactctcttggtatgcgctatagtaagattacagagcaaatatatgtgggatcctgtatacaaacagaagatgatgtagaaaccttgtcaaaagttgaggga

SEQ ID NO: 30256 - DNA, 298 bp, Glycine max
  modified_base (282)..(282): a, c, g, t, unknown, or other
gaacgaaggatgggcatatccattcatggaacgatcgttagaaagcatgacgtttttttcttaaaaaaaaataaaatcaaagtaattaatagaaattagaaagtacaaaatggtccctatataacttgagtgtcctaagctcgcaataatacgataaagggtttttgttttgtttccttgggtgctgcatgcactttcactcgaagaaccttgaagcgagtctgggccacagcaaccagcgacaacaactcaatcagctagggttgctttgcttgctatctngttggaagattttctg

SEQ ID NO: 30257 - DNA, 411 bp, Glycine max
ggaattgaaaatcgagaaacggaatgatgaaagagcgtagggagttggatctgtggtttggttgcgatgcggtgtgttgcgaatcactgtccaatcccgatcgcttgatccagacagtgaatcagaatcagaatcagaatcagaatcagagagaaacgatgagggcagtaagtgcgttaatggtggctcggatgttgacgcgggaccactcgctccctgtccttggcaacgaaagcatacccttcggatcggtgtggtggttcgcctatgccggcgtctcctgtttcctcgtcctcttcgctggcatcatgtccggtctcaccctcggactcatgtctctgggcctcgtggacctcgagatcctcgaacgcagtggttctcctgccgagaaaatgcatgctgcgattatac

SEQ ID NO: 30258 - DNA, 365 bp, Glycine max
ggtatttgatttgtcaaatacatcattattggatactcttttatatgtatggcgcaacccaatttttgttttttttttcaatttttaatctcctatccctttttttaattttggaatcgaaatatctaatctaaataatccaaaaattcactcttaatcttgacagtgatatatgttgtatatgtaaatcctagatgtaaaaataggcatacttctcccgggaaaaaaagtaggtaaaaaaatatgctaagtataaattgtctactgatgaaatacgaaagctgatgatattgaaaaaaaaagaattgtaaataaggttcaggttcgacttccatagagattatagatgatatcgtctataatga

SEQ ID NO: 30259 - DNA, 420 bp, Glycine max
ggtgacagaacagcagaagggaagaagatggagttactggagttatgggcaattttcggccccggcgtcgccggcgctgtcttcggcgccggatggtggatctggcttgacgcggtcgtctgcagcttggtcaccgttcccttccttcactaccttcccggaattttcgcatcttttgcggctttgatgttcaattgcgttagaaaagaagacatcgattattctccatatgacgaaggcgagtggagactgaagctgtggctcttcattgcatatgttgtatcctttgattctttagctggatcagctggcctactgatccaagattcacttgataaatctgccccttcagtttggactggagttgcaggtgttttgcagtgtgtttttgacttgatcagtggactggtatattggact

SEQ ID NO: 30260 - DNA, 294 bp, Glycine max
ggatgaggcaagaagttgtattttggcatccccgtggcttcaagaagagaatctcaatggaggcccaggagctgaagcgcgtgttccagatgttcgaccgcaacggcgacgggagaataacgaagaaggagctgaacgactcgctggagaacctgggcatcttcatctctgacaaggacctgagccaaatgatccagaggatcgacgtcaacggcgacggttgcgtggacatggacgagtttggggagctgtatcagaccataatggacgagcgcgacaatgaggaggacatga

SEQ ID NO: 30261 - DNA, 392 bp, Glycine max
gggccctctccgagcagcaaatccaaacatccaatttagaaaaagaaaaacagcctcctcgccccttacatgtccaactaattttgaagggctctaatgggacaccagagaataagattggtgtgcatgattcacatgtttctagtgagaggcaggagagacatgttagacataaagatagacctgatcgtggtgtctggacaagtcgttccaatggagctgacgactctttctcatcttctgcttcctcacaagtagatcctttggaaggaagccatgcagatttgaaacatgacacgccaaatgcaagaagtggggaggtaaaatctcttggaagtgtccgtactagtcactcatcagaaaatggtttcaataagcattttggtcgtcgt

SEQ ID NO: 30262 - DNA, 361 bp, Glycine max
gagacaaggtaggactggctttcctttggttgatgcaggaatgagagaactttgggcaacaggatggatacacaacagaataagagtaatagtttccagttttgctgtgaaaatgttgcttctaccctggaaatggggaatgaaatatttctgggacacacttctggatgcagaccttgaaagtgatatcttgggttggcaatatatctcaggaggcttaccagatggccatgagcttgagcgcttggacaatcctgagattcaaggggctaaatttgatccagaaggtgaatatgtgaagcaatggctacctgagttggcaagaatgccaactgaatggatccatcatccttgggatgca

SEQ ID NO: 30263 - DNA, 422 bp, Glycine max
gagtgtgtgagttcattaacatatacaaattctgtgtgttgtgttgtgtacttgtgttaattgtgttgttgttgtaggaaatttaagtgaagagagaatgatgatgaagtctgctatgtgtgcattggtgcttgtggcactggttgtggttgaagtggggcccatggctgaggctgcggtgacttgcaacccaacacagttgactccttgtcttccggcaattaattcaggttctgcaccttcgagtgcttgttgccagaagctgaaggagcaaaagccatgcttctgtggctacctcaaaaaccctagcttgaagcagtatgttaactctcctaatgccaaaaaaaccgttagttcttgtggtattgtctatccaacttgttaagcacctcttatatatatatataaaatgtgtgaacaat

SEQ ID NO: 30264 - DNA, 327 bp, Glycine max
ggagaaaaagaaaaagaagaagagagagagagagaaagagagaagagaggagggtgtgtttctggtttttggaaatttcagcccccatcgaaaaacaagaagccccaacgatagtaatcatcgaaggaatttgaaaggtcgaaacttgagcatctgggatcgcgaaattggggattttggttaaaagggtttaatcttcggaactgattgatggcaaaactgtacgtgaaggccgtgccaccggcgggatctggacaggaacacggattggttcacgtaccctggcctttggacccattacattcttattcttttcttttcttggat

SEQ ID NO: 30265 - DNA, 420 bp, Glycine max
ggcggtggagaaggaaagaatatctatctctcattctctcgtgcctcaacgcttttgtaactcctttcgcttttccattccaacctctttcacacttcagatctgtttcttcatcggttgttcaagtaaatggcctttgtcaccactgctgaagtgtgtgatgcgaacccacagttaattttgagtggggagcttcgtgcccttcagccagtttttcagatttatggccgtcgacaggttttctctggacctatagttaccttgaaagtgtttgaagacaatgttttggttcgtgagttccttgaagagaaaggcaatggaagagttctagttgttgatggaggcgcgagtttacgctgcgctatattgggtggcaaccctgtggtacaagctcaaaacaatggatgggcaagtattatt

SEQ ID NO: 30266 - DNA, 424 bp, Glycine max
gaagcgaatgaggttatgaagaagcaggaggctgagcttgaggagctaaagagggtggttcgagagaaagaggaggagattgaggttttgttggttcagagggaggttgagagggagaagctgaaggtggctgaagcgaatttggagaagcaggcaatggactggatgttggcgcaagaagagctgaagaggctgggtgaggatgctgcgaggcatgctgaggagagtagtgagaccttggaggatttcaggagggtgaagaagcttctcaatgatgtgaggtctgaattagtttcgtctcagcaagcgttggcatcttccagaagcaaaatggaagagcaggagcggttgttggaactgcagctgagtgagcttggggagcagagggcaagtgtgatgtcctacatggaaaatttgaaggatg

SEQ ID NO: 30267 - DNA, 390 bp, Glycine max
ggagaaagaaagaagtaaaagacgtgagtctcagccggggcatgttctgaagtcttcttctctgcttgtatgcaacggccacagccatagtcgcctgaaaccgattgttgttgcagggaaaacacagagatccgggtcgacccgttgcagatccgatccaaataagaaaagatgaatattttcaggttagccggggacatgacccatttggccagcgtcctcgtccttcttctcaagatccacaccatcaaatcctgcgccggtgtctcattgaagactcaagaactctatgcactcgtttttgcttgtcgctacctagatatctttactaattatgtatctctctataataccactatgaagttgatattcttgggaagctcattttct

SEQ ID NO: 30268 - DNA, 409 bp, Glycine max
ataagaggttcacgaggaattgaagaagccttattgaaacacttgggagtgaagcgcaatgaagtaacaccagatggtttgttttctgttggagaaatggaatgcatgggatgctgtgtgaatgctcctatgattacagtggccgattattcaaatggatcggagggatatacttataattactttgaagatataaccccagagaaagtagttgagatagtagaaaagctgagaaagggtgagaagccaccgcacggcaaccaaaaatcccggcgaattaaaagtggaccttgaagaaggaacactactttgttaaaggagcccaaaccttcttcctgccgtgacctggattactgctgaagtgttgtatactttttgcctttaataatgtgaggcttgcatgtcttgg

SEQ ID NO: 30269 - DNA, 407 bp, Glycine max
gtattcggttcacgaggaatctatgatgcctcagtgaaacacttgggagtgaagcgcattgaactaacacctcatagtttgcaatctgatgtacaaatgcattccatggcatgcttcttgaatgctcctatgaatactgaatccaattattcaaatggatccacatggatatacttaatatcactttgaatatataacttactcataatgtaattcatatagtataaaagctcatacatgatgacaaaccaccgcacagcacctcaaaattcccaacaaattaacagtgctacctgacggatggaacactactctgttaagtgagcttaagcctgctgcctgccgtgacctggatcactgctaaagtgtcacatactatttgcctacaataatgtgatgcttgcatg

SEQ ID NO: 30270 - DNA, 399 bp, Glycine max
ggtctgaaggcgaggttaagcatagaagaaaggggagaatggctagagacagcgtcctaacacgcgtggcgaccggagccgccgttggcggtgctatcggcggcgcagtcggtgagataattttcacttcttattcacggtttggttggatccttttcattaataggcaaacacggcacagctttcgctctgttcttaggttagtgtgaattttggaactggtgtgttgcatgcaggtgctgcttatgggacttacgatgcaattaggtataaggtatgcgattcaaatcctttatttatgtaatcgattattgaatgagtgaatttggaaaggcaattgcaatcttttgtaatttgattgggggcagtttagtctcaaaagctatgctgattatgact

SEQ ID NO: 30271 - DNA, 237 bp, Glycine max
gacaacagtggatccataaatagaaaagtggaaaatagtcaactggaaggtttctatgtagacctatcaattaccaaggaagttattgtcgaaaactctatcagtgtctccattaggaagtgctctgagacagctaggaatattttatatttagaaacagatatacctggagatattctccttaactggggggtttgtagggatgatttgaagtggtgggaaattccacctgttccc

SEQ ID NO: 30272 - DNA, 339 bp, Glycine max
ggagggcagagggaagggttagggaacaattggagtgcacgaaagcgatgccaaaaaaaccaaacaatcattaacaacagccctaaccccccccgacgtctttcaaaactgattcggagcaattaatgtaaaatctatggacatcaacgaggaatcttcattctctctccgtttttgtttgcatcattaatagacccaaatggacccgaacccgacagcctcgctggactccgacccggacccgcttcgcgtgaagaggaagaccctcgaggccgtgcctctgcagtgtcagaaagcttttgaatcgattaacgcctcttctgctactgcttcttcttc

SEQ ID NO: 30273 - DNA, 177 bp, Glycine max
ggaacagagtgtgataatagtaagacagagcacctactcactcgtaaatggcgaggaagaagatcagagagtaccactccaagaggcttctcaaggagcatctcaaacgtctcgcctctatcgacctccaaatcctctcagctcaggtgacagaatctacggatttaactgacctga

SEQ ID NO: 30274 - DNA, 252 bp, Glycine max
ggatgatctgaggaaccgtgtttgtctcgtgtctcatctcatccatgaagagaaggagaagaagggatccaaaatcagaagaaagttacgatttttcgagatgggtctgtccaaggagaatctgaaaggtctcatactagctttggtgtcaagtgggttcattggggcaagttttatcattaagaagcaaggccttagaagagctgcagcagtttctggtgtcagggcttgtggtggtgggtaataataatc

SEQ ID NO: 30275 - DNA, 204 bp, Glycine max
ggcagtgagtagtagtgagattgaattgaggttgaagtgtgttgtgttgtggcaaagctcagaaaaagagagagagattgaagaagcgatttttttatatgaaattttgaagagtgaatgaaaaatctcaatcccatggatgagcaattgaatttgagctgaatcggcgtcggttcgatttctctcagtcacacactactgact

SEQ ID NO: 30276 - DNA, 405 bp, Glycine max
ggcacaagtgagtttgttgatcgagataactagagacagtgtgatgaaaatgaaggtccttgttttcttcgttgctacaatcttggtagcatggcaatgccatgcgtacgatatgttccctctccgaatgaacactggctatggtgcccgtactccggaggtgaaatgcgcaagttggaggcttgctgtggaagcacacaacatctttggctttgagaccattcctgaagagtgcgttgaagcaacaaaggaatacatccatggcgaacaatatagatcagacttcaaaacagttaaccaacaagcttacttttatgccagagaccttgaagtccattccaaggacacatttgtgttcagtatagattgcaccggactttctaatattccatacttcaaaaaaca

SEQ ID NO: 30277 - DNA, 249 bp, Glycine max
caagaaaggtggcgagaagaacattctagtctttgatcttggtggtgggacctttgatgtcagtatcttgacaattgataacggtgtttttgaagttcttgctacaaatggagatactcatcttggaggtgaggattttgatcaaagaataatggagtacttcattaaattgatcaagaaaaagcatggaaaggatattagcaaggacaacagagcacttggaaagctgaggagagaggctgagcgtgc

SEQ ID NO: 30278 - DNA, 324 bp, Glycine max
gcgagaagacgacagacgggggggaaaaagaagagtaattggcaaattgattttggcttgctcggcaacacggtgggagcattcttcacttgtccttggttttggaacgactacagccgagctatctctcattccattttcatccatcaatggctccagtagcatcagcatcttcagattcaatcaagccaagagatgtttgcattgttggtgttgcacgtacaccaatgggtggatttcttggtaccctgtcatctctatctgccaccaagctaggctctatagctattgaagctgctcttaaaagggccaatgttgatccat

SEQ ID NO: 30279 - DNA, 406 bp, Glycine max
ggagcgaaagaggggttttggaacgtgcatgagccggtgctctaatctctgcattctgtgatggctctaaatccgttcacgtgtcctcgtcccgattcgtggtaccccacgctctccgttttcacactcgccatcggcctggtcttaaccgcctctttcttcatttatgaagcaacatcttctacgaaaagtcgttcacttgttcaggagctgacaactggtgcagtggcttcagtcttcttgtgttttgggtcctcgatcctactacttgcttctggtgtgtatgtctaatttaaacattgtatcggatgaaaatgttgctaatccgatagctgtaaatgaaaaattgcattggacgttttagttggatattctactcttaggcatgttcttaatctatcgataa

SEQ ID NO: 30280 - DNA, 340 bp, Glycine max
ggcacccagagaggatgaagcttcgagagagagagagggatgaggcaaaggggtgacgctccatcaagatgggtatttctagggattccatgcacaagaagcgtgccactggtggcaagaagaaggcattgagaaagaagagaaagtatgagcttgggcgtcaggccttaaacaccaagttatcaagcaacaaaactatccggaggattcgcgttccaagtggcaatgttaaatggagggcattgatgttggataccggctattactcatgtggtattgaaacagttactctcaagactctgattctagatgtttgatacaatgcctcaaacaatgagct

SEQ ID NO: 30281 - DNA, 247 bp, Glycine max
aggcgtgagaacacctcagagaggactacacaggggggatgatgaatatggagacggatatctaaacgccagtgaagtctcacatttttactatgtgtatgactccgaagctgcagcacaagacgcatcccaaagcagagcagtagagacacttaacagatcagaaagtacacattcttgagccgagttgctcatacacatgtattaagagcataaactctatgcagatgattccttgtacaagtgg

SEQ ID NO: 30282 - DNA, 368 bp, Glycine max
ggacgtaagattttagtattgtcaggggtagtgtcggtgatgaagtaactagaataaatatagttacaacatcaacttccatgttcttcatgtttcacttctgctttaagtttgtggctttctactttctctttctagagtaggactaaactcatacactgatcatgggagtggatttaagacaagtggtggcgggtgtcctcaccctcacaatgttcgtcatgcttatacacatgatcaaaagagaccattttgatgctgttgatgataaactttctgaaacggaggatgtcaacttttgaaggtccaaccttggttcctactaaggttggaaggaccttcggaatttgaaaggaaaatgggattag

SEQ ID NO: 30283 - DNA, 365 bp, Glycine max
gacaggagggaggtgagggactgatgactgagatagcggtgattcaattgcatcatcacaatcacaacattgcttattgacattcatatcctctcattctctctctttttctttctcttcaattccaaacctatggcggatcagagccccaaaccagagaccttcgaactcaacaatggcagcatgcaagtcctcctcagcaatctcggctgcaccatcatctgcttatccgtacccggaaaagatggattgttatccgacatcgtccttggcctaaaatctgtggaatccaatcaaaaaggtttggttcctaatttgggttgaatggtggccaggtttccaacccgatttaaggttgccaggtt

SEQ ID NO: 30284 - DNA, 403 bp, Glycine max
ggggaaagtgagggaagcacgagaaagcttgcgagaatttcacgttcttcttctatttgcaaacactgattttccattccattactgctattgttatcattcttattttgctgtgatcaaattggtttttcgtattaagaattctcattattattactgttgagactttcctatcgccttgcaccaaagaactcggttcccacttttctctaattctagggcaactttttcggccaaatccttttctttccatcgaaaccagctctcattggcaaattaacgcgctttgcgtggtgccatcttcggtgggatggaaactagggcatgaattggccgtacagaagaaaaaagcgattaaaaatgttcttcagcggcgatccttcgacgcggaagcttgtcgatt

SEQ ID NO: 30285 - DNA, 414 bp, Glycine max
gacagcgatggtggcagcacgagtggctcgcgaagatgttaggcataaagggtggcttcttgatgggtaccctcggagttttggccaagcccagagtctggagaaaatgcagatacggcctgatgtgtatatcgtattagatgttcctgatgaaattctgatcgacagatgtgttggtagaaggctagacccagtgacagggaagatatatcatctaaagttttttccaccggatacagaagaaattgaaagcaggctgataactcggcctgatgacactgaagagaaagtcaaatctcgcctaaacatatacaagcaaaatgcagaagcagcattttcctcttactccaacataacacataagattggatggagtcattcaaaagaatcagttttcaaagagattgaattttt

SEQ ID NO: 30286 - DNA, 390 bp, Glycine max
gggctttctcatgtctctcccgtccttggattatctttcatgtaagattagtcccagaaagccaattgtaaagaccctttatttgtgttgttgttttttagtttttttttttctttttattatatgttttgagttatggaagcttgctgctgcaaccttgaagtggatgtaaatggagaagagactttcatggtggacaagactgttattactcagtattcaaacaaatttgctagactggttggaaaggcttaatgttgccccaggaaacctaaaggtattattcctggattttccagaagggcctgaaggctttaacctaaggtaaaaatcttttaccaccatgggaccacttgttttaatcccttcaaattggttctggcctggtgg

SEQ ID NO: 30287 - DNA, 299 bp, Glycine max
gggtggcggggggagagagagagagagagatgtcgagattgcgaagactgatccaagcttcagttgatgctactaagaaagttatatccggtaatcttgatgatttgatgccaccaccggagagacccatcttcagcttcaattccaagcaagagttaagcaagtggcatttgtattctgattctgaatttggaggtttgtcctctgcgtctctgcagataactgagtcggaaaatggagcaacttctggaatcttctccgggaacctttctctggatgtctctgaaggctctaaatgg

SEQ ID NO: 30288 - DNA, 416 bp, Glycine max
cgggataagcattcattttcatcaactgctaagctaggtgaactctctctcgttgttcccttggcctctcgctctataaatacacatcgcatcattctctcacttgcacattgaaatctgaaccttccggatttcgttttgctttgttcaggtagccagccagtcatggtgctcttcaatgtttcacgcgtagagaccactcccttcgatggccagaagcctggaacctctggtctccgcaagaaggtgaaagtgttcgtgcaacctcattacctccataactttgttcagtcaacatccaatgcattaactgtggaaaaagttagaggtgcaacgctagttgtatctggtgatggtcgttatttttcaaaggaagctattcagattataactaaaatgtcagcagcaaatggagt

SEQ ID NO: 30289 - DNA, 371 bp, Glycine max
ggaagaagaagaaggtgtgtttcgacgcgcctaggcttgcggtgcggtgtgtgaaagcctcggcgcggcgaaccggtgatactatcgacgatggagagactcggactgggttcaccacacctgccatggaagtcaccacattcaatcgaaccactttcaccgatgctgctgactttcccgtttgggaaaagattggtgctgtcgtcagactcagttatggcctcgggatttatggtgccatggcagttgccggggagttttatatgttcaatcacgggaattgactctctggggggtttcaatcaatcgttggatcccatttggaaaggcctggattttccagttcttcaattattggccttttggttatt

SEQ ID NO: 30290 - DNA, 346 bp, Glycine max
ggaaatagacgggaatagagtggtaatcctaggaggtggcgttgcgggatccgtcgtcgctaaatctcttcaattccatgcccatgtcacactcgttgatccgaaggaatattttgagattacatgggcgagtttgaggtcaatggttgagccatcttttgcagagaggtcagtgatcaatcacagagattactttaccaatggcgacatcgttacgtccaatgccgtcaatgttacagaaacagaagtgttgactgcagatggccatcgaattggctatgactatcttgttattgccactggccatgcagatcctctccccaaaagtatgagggaaagacttaat

SEQ ID NO: 30291 - DNA, 327 bp, Glycine max
ggatgatgacgatgataatgggtttatgatagcctgtaacgttgcaaaatccgagtatgttgatgaggccgaagctgctgcacatgacgcactacataatacagcagtggatacacttaacacatcagaaaggacacatttctgggaggagccgttaagagacaagtatcaagagcataaagacgaggaattcaatgccttatgcaaacgtaagccaaaccagaagtccatgtgttacagagaagaggatgaccttgctggatctggcagatgtaagctctgatcgtaatatgacagtcattaagcataccttacttatggtgattc

SEQ ID NO: 30292 - DNA, 291 bp, Glycine max
  modified_base (248)..(248): a, c, g, t, unknown, or other
ggcacaagtgagtttgttgatcgagataactagggacagtgtgatgaaaatgaaggtccttgttttcttcgttgctacaattttggtagcatggcaatgccatgcgtacgatatgttccctctccgaatgaacactggctatggtgcccgtactccggaggtgaaatgcgcaagttggaggcttgctgtggaagcacacaacatctttggctttgagaccattcctgaagagtgcgttgaagcaacanaggaatacatccatggcgaacaatatagatcagactccaaaac

SEQ ID NO: 30293 - DNA, 245 bp, Glycine max
gaattcagacttcgtgaagcatagcattgcaccatgccaccaagtcatgaaaaattggcctagggacaacatgagcagattagcacttcatgggaaatcagaattcaagaatcaagtctttggaccagagtcactctatttcgatcacatgggtcgtggcccctacactggtttagccgatggacgcgtatgtttatggatggggtagcaacttggttgggaaacatttgcagttgtcacatcta

SEQ ID NO: 30294 - DNA, 291 bp, Glycine max
cggggaaggtatagaatcaattgacgcgagcggccattcatggattggcttcatgcccatacactcacactagcgcgccctttgaccgcatactctacatactaccgttttctaacatgctccctaaattctgaccacatgcgaagaagaagcatctccattactgcttcttggcacgagcagctagcgatagttttactattctgcgcgaatcctattactgccgtgaaagctatagctaaaagtacgctaggggagacgctctataggaaaacggctgagagaaagaca

SEQ ID NO: 30295 - DNA, 141 bp, Glycine max
gacgaatgtttcgaccacaaggatactgagtctgcttctgctaactctgcaaaagatgggattcacttttttttttgcaaattatacaatggctatgattctgatggcaggtgttaaagcaaagggagagaaaggtggagt

SEQ ID NO: 30296 - DNA, 276 bp, Glycine max
gaaagagagaagtaacatcaaggtgcagagagaggaattgaagcatgggaagagggaaggtggttctggagagaatacagaacaagatcaatcgccaagtaaccttctcaaagcgcagaaatggtttgctcaagaaagctttcgagctatctgttctatgcgatgctgaaatcgctctcgtcatcttctccagccgtggcaagctttttcagtatagtagcactgacattaacagaatcattgagaagtatcgtcaatgctgcttcaacatgtctc

SEQ ID NO: 30297 - DNA, 423 bp, Glycine max
gacggacgagggtttcgtttcgggtttgacgttgttcacaatcactttctgcgcttcactcactcccttcgtgcggttttctttctttgtcgaactcgtgcgaaaatgcgtgagattcttcacatacagggagggcaatgcggaaaccagatcggagcgaagttctgggaggtggtgtgcgcggagcacgggatcgattccacggggaggtaccagggggacaacgagttgcaactcgagcgagtcaacgtctattacaatgaagcgagttgcggaaggttcgtgccgagggcggtgctcatggatctagagccaggggccatggacagcgtcagatctggtccctacggtcagattttccgacctgataacttcgtcttcgggcagtccggcgccggaaacaactgggccaaaggtcactac

SEQ ID NO: 30298 - DNA, 410 bp, Glycine max
gatagaaaacagtaggagtaaagagaaaaaggatgaggtagagagaaggtgggagtggcagagagaagattacaaagaaatggggagatgggtgaattgtaggggcaatatattcccattcctggggatggtgatggctatgctagctcaaagtggaagcatggtggtaatcaaagttgccatgactgatggaataaacaaatatgtcatggttgtgtactctttggcactctccaccatattgcttcttccctttgccttgtttcttcacaggtcagagcgtcctgctcttacattctctgcactttgcagtttcttcttgcttgcattctttgggagttcaggacagataatggcttatgttggcatagatctaagctctcctactcttgcatcagccatgcttaatc

SEQ ID NO: 30299 - DNA, 276 bp, Glycine max
tgggacggctaaaagctaaaaatcagcgaagtgctcaaattagcatggctgtcacggttgcattcttgaatttgatcatcatgtttacagtagtctctacaagcaagtcactgagcttaaactactattcaaaaacatgccctgatgtgtaatgcattgttgccaaggcagtgaatgatgccaattgtttggagcaaaactgttccagctgcacttctgcgaatgcacttccatgactgtttcgttcggtggtgtaatgcctctgtgctgctaaat

SEQ ID NO: 30300 - DNA, 379 bp, Glycine max
ggagtgagcaagagtgaagagcgaagagaatggctcccaagggtttaatctttttggctgcgttatgcttctcagcactgtcactgagtcgttgtcttgcggaggataatggacttgttatgaacttctacaaggaatcatgccctcaggctgaagacatcatcaaagaacaagtcaagcttctctacaagcgccacaagaacactgctttctcctggctcagaaacatcttccatgactgtgctgttcagagttgtgatgcttcactgttgctggactccacaagaaggagcttgtctgagaaggaaacagatagaagctttgggttgagaaatttcaggtacattgagaccatcaaagaagctttggaaagggaatg

SEQ ID NO: 30301 - DNA, 424 bp, Glycine max
tgggcggcaaagtggtttcatctactgttgttacagatgttcagcctccaatggatgctgtggagtatgcaaagtgtgaaactgttgtaaaggactttactacatttcgcgaagcactgaagaagagagggattgcagatatggatctgctgatggttgatccctgatgtgctggatatcacagtgaagttgatgctactagccgaagacttgctaaaccactaatattttgtacgactgacagtgactgtcccatggaaaatggctatgcccgtactgtagatggaatccatgtacttgttgacatgcagaatatggtcgtgcttgaatttgaagaccgtaaacttgtcttacatttacctgctgatccactaagaaattatacttctggtgaaaccctgagaggagtttactcgaatgatgt

SEQ ID NO: 30302 - DNA, 411 bp, Glycine max
gcgacaaggaatgggtgttaaggcaggtgtctttcagcagcatcttacatcaggtcaacactcaacatattcccatcagcagctgaaacaagggagtgcatttcctgtttcttcaccccaactccttcaggctgcctctactcagattcagcaacactcatctccccaggttgaccaacaaaatcatctcccatctaaaacaaaagtcacaactcctctgcaatcttctaattcaccctttgtgggacctaccccttcaccttccctggctccatctgctatgccaggagagtctgagaagtctattccttgtgtttcatcaatatcaaatgctgcaaatattggacttcaacaaacagggggtgcagtagcaccagctcaatcccttgccattgggactcctgggatatc

SEQ ID NO: 30303 - DNA, 371 bp, Glycine max
gattctctctatgagggaattgatttctactccggtgttactcgtgccagattcgaggaactgaacatggatctctttaggaagtgtgtggagccggtggagaaatgtttgagggatgctaaaatggacaaaagaagtgttgatgatgttgtccttgttggtggttctaccagaattcccaaggttcaacaactgctgcaggacttctttaatggaaaggagctgtgcaagagcatcaatcctgatgaagctgttgcatatggtgctgctgttaaggctgcaattttaagtggtaaggccaatgaaaaggttaaggaccttttcttcttggaggtaaccctttaatttttgggttggaaacctgttgccgt

SEQ ID NO: 30304 - DNA, 317 bp, Glycine max
ggggccaaggtagtggctcagcgtgcccgatatcttccaccctttggctattcctaaccattgagtacaacttcacattttagaagaataccccctcttttgctgcatcagaggagttgtaaattaatagcatggctgcacaagctcttgtatcatcatcttctcttaccttctcagcggaggctgcaagacaaagtcttggaccaagatcactccaatctccatttggcttctccagaaaagcctcctttcttgttaaggcagctgctaccccccctgtcaagcaaggatcagacagacctttggggtttgcatca

SEQ ID NO: 30305 - DNA, 370 bp, Glycine max
ggttgatgccattaaagagttgcaatctcatggaaatattcgtttgaagagaatgggggaacttgatactagaccattccttgaagcaatgaagcaaagatataatgaggaggatgctgaagagagagcttcagaactgtgttcattgtgggaagaatatctaaaggacccagattggcatccattcaaagttatcatggttgaaggaaaagaaaaggaaattattagagatgacgatgaaaagctgaatgggttgaaaaatgacttgggtgaaggggcatataaagcagtggtggaagctttgttggaaataaatgaccttaatcctaggggacgatcctaaacctaagattaatggaactttaaccaa

SEQ ID NO: 30306 - DNA, 400 bp, Glycine max
gacgcggagatggagttaaaatagaagaattatgaccagggtcggttgcgtcgccgttcaggaaaattgaattcaatctgaaacgccctgtggtcatagttccaattccgaaagaatttcggggtgtttccgatttccaaacactcactcacacccatccttctttctttcaccgcaatattttttcctttttgaatcaaacttcggtttcttaatttctcattatcatatcttagatcttcagttttggatccacacaataatttgggggaaattgaattgaagcatcatcatcatcgtcatggatagcataatgagcaagctccgcaacctcgacgcgtaccctaaaatcaacgaggatttctacagccgcacgctcttcggcggtgtcatcacgctc

SEQ ID NO: 30307 - DNA, 393 bp, Glycine max
ggaatgagaagagaagagaatctccaaacccaacactttgtttgacattcccattcattcacgctaaaatgattcgtcaatctctttacacccctccttccatcaccttctcaaccccatctccaaaacgtcaccgtttcgctcctcctagttggagaattcgatgcgacgcgtcgtcggtgtcggtggagcagaaggttgttgggccttaccctggtgggctgggcccacacacgggtagagacccaaacgcgaagaacccaaattggctgaggcaaaaagctcctaaggccaaagggttccagaagattaaggattcctggtccaattggaggttaacaattgcttccaagaagcacaatgccccaaccttagaaaatggtggaatggaag

SEQ ID NO: 30308 - DNA, 217 bp, Glycine max
ggggagtggaagtagtagcaagtacgtcgtatatgtggttgatcttttgctggttgtttgttttgttccttccaattgtcagatctgaatcaccggactcactcttcacactcactcacactgaatggcttctgaaggcgaccatcaccaccactcaccaccaccatcaagatcacgatcatcatcatcatgatcatgatcaccatcatcattacga

SEQ ID NO: 30309 - DNA, 417 bp, Glycine max
ggtggctaggggtaaccaactctatggaaacacgacaacagattaggattacgtaccatttccttgatcctttttctgactcttactaaaagtctaagctcaactgcatttgatgtcagtgaatatgaagattgggagagcgttgatacagcagattctatcttaagttatggaagtgaattgggagacatggaagaaaatgaatggcagatggtgcaaacgaaaggaaaccaatttgtggtgaacgaccaacctttctatgtcaatggattcaacacatactggttgatggtatttgctgctgatgagtccacacgagggaaggtcactgaggtgttcaaacatgcatcctctgtgggtatgtcagtttgtaggacttgggccttcaatgatggccaatggcgtgctcttcagaaa

SEQ ID NO: 30310 - DNA, 417 bp, Glycine max
  modified_base (322)..(322): a, c, g, t, unknown, or other
  modified_base (363)..(363): a, c, g, t, unknown, or other
gaatgacagagaggccaacgaggaagagaaaggtgggagacacaaaggagagagctacgaagaaacccgcggcaaaatggcctctcatcaaacccaaaaagaatcttcagattagccgactccgagatttcgatctcttcacggtccagaattttttctcctccgctgaatcaaaggcattcgttaaaattgctgaagaaattggttttactcatcaggggagtctaggtccaacttatggcgaagcattcagagataatgatcgaatgttggtggatgatcctgtccttgcagatactatttgggagtctggacttagcanactattttctgatattaaaattcgaggaaagggtgctgtangcctcaatccaaatattagcatctataggtacaaggatggtcagcgctttggac

SEQ ID NO: 30311 - DNA, 373 bp, Glycine max
gatagagtagaatgataaccaaaacgaaaaaacaagcgtcatcaccttcttcactccctgtttctgttggttccatcccttcattcacaccttgatccgcgatctcctaatttctcacttgaaagtatgaagcaagaatagataagtaatggcaggagcagaagcaagggctctgtggcagagaactgctaatcggtgctttgtccaagaagatgcaaaaagagctcccaagttggcttgttgccaatcttcatgtgcaacatcaaaatcaagtgatgcttgacctgccagtacagcagatgaatctgatcatactacagttaatgttacccattttaacaagaaatcgtcaatttctaatctatcaccagac

SEQ ID NO: 30312 - DNA, 228 bp, Glycine max
acgcgtgagacgactcctgagggggctcgtgtattcgaccattggggatagagtataatgctaccagtctacaaatcagcttatgacctcattactcgctggtatgtggaaaacatcccttcattcacaccttgatccgctatctggtaattggtcatttgaacttctgaagctggtatatatgacatatgaccctatcacaaaccaagactttgtggcatataacta

SEQ ID NO: 30313 - DNA, 402 bp, Glycine max
atagtcaaagagtatgttttgggctcgcagatggagctggggaggagggaagttaaggacaatatagtacgacagcaggagcttgcagcatatttcactcactgcaaccttcagacacctcacttgaggctagctttgcagaatgcaatgactgtctgcttcagggcgaagaaccttgccactgctgcaaactttgcccggaggctacttgagacaaatcctaccaatgaaaaccaagctagggcagcaaggcaagtggtagcagctgctgaaaaaaacatgactgatgctacccagttgaactatgatttccggaacccatttgtaatttgcggtgcaacctacatgccaatctatcgaggacagaaagatgtctattgcccatattgttcttcacgtttt

SEQ ID NO: 30314 - DNA, 349 bp, Glycine max
ggagattcaaagcaacaaattgttttccttttctgttcaattcattttcctaagagaaaaaaacaaaccgaaatttcgagcaaaatgagagaaattgtttctgtcatggaaaactagttttttttttttttgttagttcacttcggattctccgacaattcgccgatcttacattcgccggaatttcgcttcgtctggttaaaatcgcgacctctgaacagcaggctttcaaattgagtgctcattaatctgatcacgggtcttggattgctggtttttggggttggatccatcaattttggcatggttcctaaaatttggattggcaaaaagggttaaagtccggttt

SEQ ID NO: 30315 - DNA, 405 bp, Glycine max
gtattataataataatattattattattacttgggtatattcattattcatcctaagcaataataaacccatatttaagtgtagtatacccatttgatttgcctcattagatcgggttggctacgaatttattttcaaaaaccttctcttttctcaattgggtttccatctttgatttgatttcattgccatggctccaaaggatcccaagcaagttgctgatgctgcttcttctggtggtgggggtggcttttttgcttctattgcttccagcttgtccaatttcggtagtgccatgtccaaatccgttaatggtttggtgggctacgaggggctggaggttgttaatccagatggaggaactgaagatgctgaagaggaagcaagaaagggacgatggaaaca

SEQ ID NO: 30316 - DNA, 413 bp, Glycine max
ggacgatacaagggtagggtattaagccgtatggcttgagcctttcccataaacacaaacacaagcactgaattgagttcactgtccacaagtttcgccccaacactcaactcggctcgtcgctattgttgttgttcttcttctccatatcaaacaaagtatagataaaatatcattgcagctttaattgtcatcctccaattaattagcaatggggcacacatcccttttaactccctcttcctttctaaggttcaactctctcctggtttcttcaaccccttttcttctttaagcttcaaccagggttcttttcccggccttttcaagaaccttagggaattcggtgaagattgaaaggattattaaaattctgcttggaaagccatgtattgtgatgaattttggacacc

SEQ ID NO: 30317 - DNA, 405 bp, Glycine max
gaaagcaaaagggaaagagggtgtctttaatttcacagtttcatagcaattatcgacaaaaaaatccaaaatttccactcacatctctctttgtttatgacatctcaaacatttatctactctctacccactttctcagttccaggtaagcaagagaaacaatactcatctttattacagggttgtgtgaactgaagagggagggtactggtttgcggaggcagtgacacttctgcaagcctagaatcctctctcctagttttttgtgaaaacagatagtgtggtgcttttggaggatccttttctcaaagcttgcatgtaacactatctacattttggtgatcagttgaagtgtggaaaaaatcttaagctaaaggcaatttgggaagctggaacaatgggttc

SEQ ID NO: 30318 - DNA, 427 bp, Glycine max
ggcacaagtgagtttgttgatcgagataactagagacagtgtgatgaaaatgaaggtccttgttttcttcgttgctacaattttggtagcatggcaatgccatgcgtacgatatgttccctctccgaatgaacactggctatggtgcccgtactccggaggtgaaatgcgcaagttggaggcttgctgtggaagcacacaacatctttggctttgagaccattcctgaagagtgcgttgaagcaacaaaggaatacatccatggcgaacaatatagatcagactccaaaacagttaaccaacaagcttacttttatgccagagacctcgaagtccatcccaaggacacatttgtgttcagtatagatggcaccgtactctctaatattccatactacataaaacatggatatggggtggagaaattt

SEQ ID NO: 30319 - DNA, 421 bp, Glycine max
ggttacagtgggagtagcagctcaaacttggagactacaaaagcagagagatctgtgtggctgatgaagtgccctttggtggtggctaagtcatggcaggctcatcctccttctcaacctctcgccaaggttgtgctctaccttgatcctctccaccctgaagaagacgatccctctgcagtccagtttacaatggagatggctggctccgaagctgtgaatatgccaaaaacttattcattgaatatgtttaaagactttgttcctatgtgtgtcttctccgagactagccaaggtggcaaggttgcaatggaagggaaagtagaacataagtttgatatgaagccccatggtgaaaacattgaagagtatggtaaattgtgtcgtgagaagacaaacaaatctatgattaaaaatcgac

SEQ ID NO: 30320 - DNA, 392 bp, Glycine max
ggggaataccaatattagagacgctccacatcaccctgggttttggactcaatcagacggtgatggtgtgtccatctttaattcgaagcatatttgggttgatcattgctctttgtctaattgtcgtgatggtctcattgatgccattcatggatccacggccatcaccatctccaacaattacatgacccatcatgacaaggttatgcttttggggcacagtgattcgtacactcaagacaaggacatgcaggtcactatagcattcaatcattttggagaaggccttgtccaaagaatgccaaggtgtagacacgggtatttccatgtggtgaacaacgactacacccactgggaaatgtacgccattggtgggagtgcaaaccctacca

SEQ ID NO: 30321 - DNA, 348 bp, Glycine max
gaaggggaagaagggaaaggtccattcaacattattgtcattcagagaagagaagaggttttgcatcgcatcgcacagagatgaattcaattacaagaagcggatcgcttagtatcatcctcgttgttttcttctctttgcacttcattcttggtttttccgacgactcatcacctgcttcaaaagatgctacatagacagaacctcatgccggaagaagcactagtggctatagtaatcatggatttaattgggctggggttcttttcttggtcttccttggactttttaaacctgtggccgaagaagaaaaaggaagggccatatgctccgcttttggaattattt

SEQ ID NO: 30322 - DNA, 399 bp, Glycine max
ggttgaagtggggcccatggctgaggctgcggtgacttgcaacccaacacagttgactccttgtcttccggcaattaattcaggttctgcaccttcgagtgcttgttgccagaagctgaaggagcaaaagccatgcttctgtggctacctcaaaaaccctagcttgaagcagtatgttaactctcctaatgccaaaaaaaccgttagttcttgtggtattgcctatccaacttgttaagcacctcttatatatatatataaaatgtgtgaacaatatatatatattgattaaaaaatatagtttaatttatatacacactttgatcctataaaaacatcttgacacaagcattcaatagaatttcaccactttatcatgacattttactataatgatgt

SEQ ID NO: 30323 - DNA, 338 bp, Glycine max
ggtactttcgatgatgaaaatgataacccttctgaaggtgatgtggcgttgagcaaggggctccagccttttgtcaggaatagcaaaaacaagcatatgattgagcaactacttatgaaggagtcattctcaagggaagaatgtgaccggttaataaaaataataagatcaagagtggtagatcctgcaaatgatgatgatggggataagagccaacggatatgtccaccaggatcctggaaagtgattaacctaacctcaatgatgttgccataatgaaggcaaagaaatggctgcaggaaaggaattcagctttggatccaattccggatttaggt

SEQ ID NO: 30324 - DNA, 430 bp, Glycine max
ggcacaagtgagtttgttgatcgagataactagagacagtgtgatgaaaatgaaggtccttgttttcttcgttgctacaattttggtagcatggcaatgccatgcgtacgatatgttccctctccgaatgaacactggctatggtgcccgtactccggaggtgaaatgcgcaagttggaggcttgctgtggaagcacacaacatctttggctttgagaccattcctgaagagtgcgttgaagcaacaaaggaatacatccatggcgaacaatatagatcagactccaaaacagttaaccaacaagcttacttttatgccagagacctcgaagtccatcccaaggacacatttgggttcagtataaatggcaccgtactctctaatattccatactacaaaaaacatggatatggggtggagaaatttaac

SEQ ID NO: 30325 - DNA, 390 bp, Glycine max
atattaatcttttattagaagtgcaatgttcaaacatcattctccttcctaggtaactactttttacacttctaccttgaaagcactggagacttggaagttcttcatcctttaaatcactgtataggcaatgcattttacgattttatgctctggttaattgatgtcggttttggacattcttcaaagtaacattagaccttgattgacattttgtattttcaaaatagaaatttatgccatctgttgcatgttcagggcggctgaagtggatatcacgagaggaaactctggagatgtttccactgcagtaaggtcaaaagatgacgtaaagatgttgatgtcacagatgcatgatctctcctttatgcttgagaataatctttcaat

SEQ ID NO: 30326 - DNA, 424 bp, Glycine max
cattgacaagcgtgttattgagaggtttgagaaggaagctgctgagatgaacaagaggtctttcaagtatgcctgggtgctggacaaacttaaggctgagcgtgaaagaggaatcaccattgatattgctttgtggaagtttgaaacaacaaagtattattgcacagttattgatgcgcctggacatagggatttcattaagaatatgattactgggacatcccaagctgactgtgctgttcttatcattgattcgaccactggtggttttgaagctggtatttccaaggatggacagactcgtgaacatgctctgctttcattcacccttggtgtgaaacagatgatttgctgctgtaacaaaatggatgctactacacccaagtattccaaggccaggtatgatgaaattgtgaaggaagtc

SEQ ID NO: 30327 - DNA, 284 bp, Glycine max
ggttgttgttttcagtgtagtggaagaatcactcgcttatgcatttccacaccacaccatggcctcaaccaacgctctctcttcagcctccattctacgctctcccaaccgccagtctctgacccgaagagcgaaccataatggaagagtaaattaccggaaaccgaataaccgtttctccgtgaaagcctccggcaaagagattgcctttgaccagcattcccgctctgctatgcaggccggcattgacaagctcgccgacgctgttgggctcacttctgggc

SEQ ID NO: 30328 - DNA, 398 bp, Glycine max
  modified_base (388)..(388): a, c, g, t, unknown, or other
tcaatcagcatgaggcaatttcaaagtttatacaaggaactgttgctgatggtgcaccagtagtacctatttcagcacagttgaagtataatattgatgttgtgtgtgagtatattgtgaagaagatcccaatccctgaaaggaactttgtttctcctcctaatatgatcgctattcggtcatttgatgtcaataaacctggttatgaggttgatgaaataaaaggaggtgtagttggtgggagcattttgaggggtgttttgaaggtcaatcaattcattgaagttcgtcctgggattgctggtaaagatgagagtggaaatatcagatgcacgcccatatactcaagaatagtttcattgtatgctgaacaaaatgagcttcaatntgctgttcct

SEQ ID NO: 30329 - DNA, 403 bp, Glycine max
gagtactagcagtggggtccggggtgaggatgttgtatcctttggaaatcagagtgagctttccccccaacgtgctatttttggctgtgaaaatgatgagactggtgatatttataatcaacgtgctgatggcgtcatgggtttgggccgtggagatctaagtatcatggaccaactggttgagaaaaaggtgataagtgatgcgttctcactgtgctatggtggaatgggtgttggtgggggtgctatggttcttggtggcatatctcccccatctgacatggtctttacacattcatatcctgttcgaagtccatattacaatattgatctgaatgagatacatgtttcggtgaagcgactgcatttaaacccataggtttttgatgggaaacatggaact

SEQ ID NO: 30330 - DNA, 431 bp, Glycine max
tatggggatatacagccttggtaagaacgccgttctgcggaatatatgactcatgctcctttaggttccttaaattccgtgggtggcgtagctacagagattaatgcagtcaattatgtttctcctagaagttggttagctacttctcattttgttctaggattcttcctatttgtaggccatttatggcacgcgggaagagctcgcgcagctgccgcaggatttgaaaaaggaattgatcgagattttgaaccagttctttccatgactcctcttaattgagacatgagatccgatgaagtagaaatcacttttattttactataaatattactataaatattgggttgaattgagcgggtcgtatttaaataagaatttctttttcttttttcttaggttctatcgaaaaaaaaagattcgatagaaac

SEQ ID NO: 30331 - DNA, 299 bp, Glycine max
gagagagagagagaaacaaagcaaaagccatttggatcctctcttctcttctttgatctccgttacccttttcgttttctcaacacagagagagagagagagtctttcggagttcgtttgcgtgtgttgtgtgatcagtcaccgatggcagcaccacctgcgagggcacgtgccgattacgattacctcatcaagcttcttcttattggcgatagcggtgtcggaaagagttgtctgcttttggcaattttctgatggttccttaacaaccagtttattaaccaccatggccttgaatt

SEQ ID NO: 30332 - DNA, 333 bp, Glycine max
tccggtgaaggcgaggaagaaccagaatcagcggaaacagagtcacagagccaagaacaacgaacctgaaaacgcggatttagcttcgaagaacaaagtcgatgtctctgaaaatagcaataacaatagcaacatcaaaagcaagagcgatagtaatctcaaccaatctctgaaaccaactctttctccgtccgtagaggctgtcagtaatatcgataggttcttggagtttacaacaccgtcagttcctgttcagtatttctccaagacaacgatgagaagatggaagttttgcgaagtggagtatcagtcttactttacattgagtgatct

SEQ ID NO: 30333 - DNA, 420 bp, Glycine max
  modified_base (370)..(370): a, c, g, t, unknown, or other
  modified_base (373)..(373): a, c, g, t, unknown, or other
gaccaacaacacgtagtattagttcattgatttctccctcttcgctctctctcagtgaccagagacagatgatgatggagatggcgaagcgaaacgctgtcgttgcggcactcgcggcgttggtgctactcgcggcgagtgtggcggtggatgctcaggagaactcggacgtgaagacgctggtgaagtacaagcacgggaagaagtactgcgacaaaggatgggaatgtaagggctggtcaatttactgttgtaacctcaccattaccgattatttccagacctaccagttcgagaatctgttctccaagcggaactcgccggtggcgcacgcggtcggattttgggactaccactccttcatcgccgncgncgcgctttttgagccggaaggggtcggcaccaccgggaacgagacga

SEQ ID NO: 30334 - DNA, 375 bp, Glycine max
cactgaaatgatcaggggactgaacaagaagaggaaaattcttctgtagtaattccaaatcatttacaactccattctgctgaatgcttaaatctgagctttggaagttttggatctgcaaacgatgcttccctttctggatctggcccatatgcatctaggcccttgaaaagtaacttggaagatacatctggagcaaacgatgtttcaacaattgggtcctcagatgttagaaaccctgactattatggcgatgagcatcttactactacctctgatgggaatgtagctcacataactggtgtggatgctgggacttatgagcattcctccatttcgcaatcagaggctttaaaatctgaaccccctgaaact

SEQ ID NO: 30335 - DNA, 381 bp, Glycine max
  modified_base (312)..(312): a, c, g, t, unknown, or other
  modified_base (345)..(345): a, c, g, t, unknown, or other
ggattcttcttcttcttcaccaccctgtgatcgcggactcaacactctcgctagacacttccttccgcaaatggcttctcacgacagcatctccgcttctccaacctccgcttctgattccgtcttcaatcacctcgttcgtgctcccgaagatcctatcctcggggtaactgtcgcttataacaaagatccaagtccagttaagctcaacttgggagttggtgcttaccgaactgaggaaggaaaacctcttgttttgaatgtagtgaggcgagttgaacagcaactcataaatgacgtgtcacgcaacanggaatatattccgatcgttgggcttgctgattntataaattgagtgctaaagctatttttgggctgaca

SEQ ID NO: 30336 - DNA, 418 bp, Glycine max
ggctcaagtgagtttgctgatcgagataactagggacagtgtgatgaaaatgaaggtccttgctttcttcgttgctacaattttggtagcatggcaatgccatgcgtacgatatgttccctctccgaatgaacactggctatggtgcccgtactccggaagtgaaatgcgcaagttggaagcttgctgtggaagcacacaacatctttggctttgagaccattcctgaaaagtgcgttgaagcaacaaaagaatacatccatggcgaacaatatagatcagactccaaaacagtttaccaacaagcttacttttatgccagagacctcgaagtccatcccaaggacacatttgtgttcagtatagatggcaccgtactctctaatattccatactacaaaaaacatggatatggggtg

SEQ ID NO: 30337 - DNA, 412 bp, Glycine max
ggattttgaaggacgttcagatggaagatccattaaaaaggttctgtctcatgtggctcccttgaagctggttttggtgcatggatcagctgaagctacagagcatctgaaacagcactgcctgaagcatgtctgtccacatgtttatgctccccaaattgaagagacaattgatgttacctctgatttatgtgcttataaggttcaactgtccgagaagctcatgagtaatgtactcttcaaaaagctgggagattatgaaatagcttgggttgatgctgtagtagggaagacagaaaatgatccgctttcgctgctccctgtttctggagcagctcctccgcataaattctgtcttgttggtgatttgaaattggcagatatcaaacaggttctcttccagcagggtgtt

SEQ ID NO: 30338 - DNA, 292 bp, Glycine max
tactacaataccacacaatgtttttcctataatatattaacgcttaattgggcggctcttttaacctaacagggacttcttcaactttcacccacatcttcattcaccattactcatcaaaccgaaaattcttttttaaaacaaccaaaaatatttcttatttcccataaaactttcaaattacaataaacctctcaagctttataaccacttaaacaaatccattattctttcatttaacactaccaggtaagccattaaactaacctacactcacaataatatccccttc

SEQ ID NO: 30339 - DNA, 400 bp, Glycine max
gatgtgcagtgcaactactcatgataagatgaacaaatcaatcaaaattatcacagatccatatggactacaacccattattaatttttggccaaagaaaaggaagaagctgtttaccttgtagctcatacatatttcagtgtagagactagagacagacagatcctgtgtgcacttgttccgatccaacaccatatcgtatttctctgggtactgtttttcttggttattttcaaaactgaagggtgtagaggaaaaaaccatgtcaaacaacaacactactactcaaataaagtatgatatttttgttagctttaggggcaaggacatccgcaacgggtttcttagccatttggttgaggcttttgacatgaaaatatatgcttttgtagatgataag

SEQ ID NO: 30340 - DNA, 290 bp, Glycine max
ggagacagagagaatgagtacggtgggagaagggaaggtgagtagtaatggtcatggatgttgcaaatcaaggccaggctatgcttccccactggaagccatttctggtcccagagagtctctcatttatgtaacctctgtctacacagggaccggaatagagaagccagactatttggcgacagtggatgtggatccaaacctctccaacttattccaaagtcatccataggcttactgctccttaattaggtgacgaattgcatcacacaggctggaattcatgcagc

SEQ ID NO: 30341 - DNA, 311 bp, Glycine max
ggcagatgagggtgctatttctctatggagaggaagcactgctaatgttatccgttatttccccacccaggctttgaactttgcatttaaggattacttcaagaggcttttcaactttaagaaggatagagatggctactggaaatggtttgctggcaacttggcctctggtggtgctgctggtgcatcatcccttttgtttgtttactctcttgactatgcccgtacccgtcttgccaatgatgcaaaggctgcaaaaaaaggtggagagagacaattcaattggtctcgtgatgtctacaagaagacat

SEQ ID NO: 30342 - DNA, 432 bp, Glycine max
gaacacaaagggggtgttagtttatttaccatatccaaatctttggggtggggttgtgtactggggttaatggtgttgttgttgtaggaaatttaagtgaagagagaatgatgatgaagtctgctatgtgtgcattggtgcttgtggcactggttgtggttgaagtggggcccatggctgaggctgcggtgacttgcaacccaacacagttgactccttgtcttccggcaattaattcaggttctgcaccttcgagtgcttgttgccagaagctgaaggagcaaaagccatgcttctgtggctacctcaaaaaccctagcttgaagcagtatgttaactctcctaatgccaaaaaaaccgttagttcttgtggtattgcctatccaacttgttaagcacctcttatatatatatataaaatgtgtgaacaat

SEQ ID NO: 30343 - DNA, 259 bp, Glycine max
ggattttgaaggacgttcagatggaagatccattaaagagattgtctctcatgtggctcccttgaagctggttttggtgcatggatcagctgaagctacagagcatctgaaacagcactgcctgaagcatgtctgtccacatgtttatgctccccaaattgaagagacaattgatgttacctctgatttatgtgcttataaggttcaactgtccgagaagctcatgagtaatgtactcttgaaaacgctgggagattat

SEQ ID NO: 30344 - DNA, 333 bp, Glycine max
gggaaaaagtttatgcaagatgatgttgctgacggcatggaacagtcactgggtccaagagcctctagttttcgatccttgagaaggtctgttggggtccaagctgaagcataacatacaaccattggattaactggaagagacaggccaggattgctttcacaagtgtctgctgttgttgcagacctcaaatgcaatgtggtagcagcagaagtctggacccacaattcaagaatggcatctgttgtttacatcacagacgaagcgacgggattggccattgacgatccggatcgccttgccaagattaagcagcttctactgtatgtgctg

SEQ ID NO: 30345 - DNA, 351 bp, Glycine max
gagggtcagttggagtttaaggctatactgtttggtcccaagagggcaccttttgacctctttgacacaaggaagaagcctaacaacattaagctctatgtccgccgtgtctttattatggacaactgtgaggagttgattcctgagtatttgggctttgtcaagggtattgttgattctgaagatctcccactcaacatttcaagagaaatgttgcaacagaacaagatcttgaaggtcatccgtaagaacttggtcaagaagtgccttgagctcttctttgaaattgcagagaacaaggaggattacaacaagttctatgaagctttctctaaaaacttaaagcttggt

SEQ ID NO: 30346 - DNA, 316 bp, Glycine max
ggagaacaaacaagaatcaagagagagaggtgttactacgttagtctatgaacagtcaccccgagagactgaaatttccagaccctcaaatcaaactcttctattctctcatcaatcaatcaatccagttccctctcggataggaatgggaatatatctcagcactccaaaaactgaaaagttttctgaagatggtgaaaatgactgtcttagatatggtttatcatccatgcaagggtggcgtgcaacaatggaagatgctcatgctgcatatactgatctggatgagtccacttcattttttggtgtctatgat

SEQ ID NO: 30347 - DNA, 423 bp, Glycine max
gacggctaaaagctaaaaatcatcgaagtactcaaatgagcatggctgtcacggttgcattcttgaatttgatcatcatgttttcagtagtctctacaagcaagtcactgagcttaaactactattcaaaaacatgccctgatgtggaatgcattgttgccaaggcagtgaaggatgccactgctagggacaaaactgttccagctgcacttctgcgaatgcacttccatgactgtttcgttcgggggtgtgatgcctctgtgctgctaaattcaaaaggaagcaacaaagcagaaaaagatgggccaccaaatgtttctttgcatgcattctatgtcattgatgcagcgaagaaagcactagaagcttcatgcccaggtgtggtctcttgtgctgacatccttgctctagcagcaagggatg

SEQ ID NO: 30348 - DNA, 375 bp, Glycine max
gatagaagaagcagaaagagaagcattagcaagagcaagaagaactagtctaagcagaaatggcctcttcggtgatggcatctgtggccctcaaacctgcccctttcactgttgagaagtcctcagttagaggccttccctccctctcaaggaactcctcttcattcagagttgtggccagtggtggcaagaagatcaagactgacaagccttatggaattaatggtggcatggctttgagggaaggagttgatgcatctggcaggaaaggaaagggaaagggcgtttaccagtttgtagacaaatacggtgctaatgtcgatggttacagtcctatctacgacaccaaggactggtctccaccggtgatgtcta

SEQ ID NO: 30349 - DNA, 368 bp, Glycine max
gggaagaggaagggttgttctggaaagagtagagaacaagatcaaccgtcaagtaacattctcaaaacgcagaagtgggttgctgaagaaggcctttgagctttctgtgctatgtgatgctgaagttggccttatcatcttttctagccgtggcaagctttttcagtacagcagcactgatattaccaaaatcattgagaggtatcgccaatgtcgttacagcaagtcacacactggtgattcattggaacacgattcacagagcgcataccatgaattcttgaaattaagagcgaaatatgaatctcttgagcggacacaaaggcattttcaagggagaagaccttgagccacttagctttaaaaga

SEQ ID NO: 30350 - DNA, 359 bp, Glycine max
gatcgtggatttctctgaagaaaagggaagacaagctgcaatcctcgtcgagaaaattaactccaattttcattctaagttaggatttccgtctgccatatttgtgaaatgtgatgtgagtaatgcaagggatctagctgctgcatttgaaaagcattttttgacatatggaggactagacatttgtattaacagtgcggggattagtagttctgtaccattccgtgatgatcaaacggatggcacccgaacatggagatacactgttaatgtgaatttcactgctgttatcgattccactcgccttgcgattaaaatcatggaagcttccaaaaggcctggtgtgattatcaacttgg

SEQ ID NO: 30351 - DNA, 391 bp, Glycine max
  modified_base (160)..(160): a, c, g, t, unknown, or other
gaggaaagggaagggaagggagccaaagcgaaccgctaccctacggagagatggcggacacttgcatcgatattcggacggagaagacaggtgaactgccgtctacttaagatcgggcgtgcggccggcgaccgggctcccggcttacacgaagccacanttagcccaacttggttctgtcaacatgtaccagaggcccgacatgaacatgaacatcatcaccaaccccgatcagccccagccccaatctctcgaccccgataaggtccaggatcacttcgacgacttctacgaagatctctttgaggagcttagcaagtacggccccattcagagcttgaatatttgcgacaacctcgccgatcatatggttggaaatgtgtaccgtcag

SEQ ID NO: 30352 - DNA, 371 bp, Glycine max
gggccaggtaaccagaaaggtgtaccattccaaggggggtggttgttctttggcaacacttccttgccaacatgggtttctcaaaaaattctatccccaaaagccgtcccactggtggcaggaaaaaggctggaggaagaaaagaagtatgagcttgtcgccagcctgctaacactaaactgtcaagcaacaagacagtcagggaggatccggtttagaagtgaaatgtgaaatggagggcactgagattggatactggaaattactctctgggaagtgaagctgtaactcgcaagactcgtatactaggatgtggttacaatgcctcaaacaacgagcttgtgcgtactcagactcttgtaaaagtgcta

SEQ ID NO: 30353 - DNA, 424 bp, Glycine max
  modified_base (374)..(374): a, c, g, t, unknown, or other
ggaggtgggaggggaaggacctgaaccttaacttggcgggattggaaagtgcccccaaaccagtgtattttttccatgaatcccaaaaaatctgtacaaaatgaggccccaaatgatttctgtggcaaacgcttgttatagggctattgcctttgatttcaaaggctatggactttctcagcaaccagcaaagcctgaaaaggaaaccatgtttgatctggttcatgaaattgtaagccttttggatgctttgaacatcttcaaagccttccttgttggaaaggattttggtgccattccaggacatcttactactgcagtgcacccaaaaagagtagctggtatcataactttaggcattcctttcatgcttncgggtccctctgctgtggagagccaccttcagctttccaaaggggtttat

SEQ ID NO: 30354 - DNA, 401 bp, Glycine max
  modified_base (381)..(381): a, c, g, t, unknown, or other
gtatggaaaatgatggaaagcttgcaactttaacgttgcagatatggaaaatttggtattgatttgattccccgaattatttacattctggtcttcttgagtttctttgcaacaaaaccaattttctgaggaaaaaccaacatgttgggagtttgtttactttgctttgcatttatgggagcttgtgttttggcattcttgtaggaatggatgaaaaactgagaaataaaccatgtgtcatgtctaaatatacattctaattttcattttgtgtcccttcattcttctcagtctcattttggcttctatatggcacactctactcttcttgtgattgtggaggagtgtagggtttttggtaccctctgcttcacttgacanatgttgagaatgcatgcatg

SEQ ID NO: 30355 - DNA, 383 bp, Glycine max
ggagagggggagaaagaaaaaagccctttgaattcgaaggttaaaagaatcatcaggattcacataggtcaagccgggatccaagttggcaactcctgctgggaactctactgcctggaacatggcatccagcccgatggcatgatgccaagtgactcctccttcggtgtagcccacgacgccttcaacaccttcttcagcgaaaccggatccggcaagcacgtccctcgcgccgtcttcgtcgatctcgagcccaccgtcatcgacgaagtccgttgtggcacttaccgtcaactcttccaccccgaacaactcatctccggcaaggaagatgccgccaacaactttgccagaggccactacaccgttggcaaagagatcgt

SEQ ID NO: 30356 - DNA, 393 bp, Glycine max
  modified_base (384)..(384): a, c, g, t, unknown, or other
gaggcagagagagagagagaaaagcgtgaatcatgtcggacgaagagcatcacttcgattctcaggcggatgcgggagcgtccaagacgtatcctcagcaggctggtaccattcgcaagaatggctacatcgtcatcaaatccaggccttgcaaggttgtagaggtctctacgtcaaagacaggcaagcatggacatgcaaagtgtcactttgttgcaattgatatttttaatgggaaaaagcttgaagatattgttccatcatcccacaactgtgatgttccacatgtgaatcgcactgactatcagcttattgatatctctgaagacggctttgtgagtctgttgactgataatgggaataccaaagatgatctgaagcttnctactgatg

SEQ ID NO: 30357 - DNA, 375 bp, Glycine max
gacgatgagtcgatttgataactaagatattgttattcgtgatattgatccaatttgatatcatcgaaatccaatttataccattgttgaattaattatcgatgaaagatttatcatctctatgggattaaatcccgaattttttattggaaatttaagagaaataaaacataataaagattatggaagtaaatattcttgcatttattgctactgcactgtttattctagttcctactgcttttttacttataatttacgtaaaaacggtaagtcaaagtgactaatttcactgaaatctgacttcttcatttttatcaatgtaatcaatgattaaaaaaaatgaaaaaggttttcaatttttggtcttagtct

SEQ ID NO: 30358 - DNA, 400 bp, Glycine max
gatcactatggatgtgaaaggtataaaatgggggggaaatatgtaccagaaatttgagaatatgttcctggaggtggaagacgtgatgtacgaggatacagttaaatacatagagaatcagatgcaagctgctggggaaagtgttaaaaagttatattcagaaattgtgggagatttacttcccccagaaaaggtaggcattgaattgcctatagataagcgtgcggatgctgggctctgtaggaagccattccatgtatataaggaaagacatgcaaaagctgataccaagcaaagaactgaagattcaaggattgttcatggtgttgataatgttgcaacacttgctgctttatatgatggaaactgcaaggctgatgcttcatccatgttatctttg

SEQ ID NO: 30359 - DNA, 392 bp, Glycine max
agatcaaagtgactttcccatcaggtcaagagcggaatgcaccatcacaggcaattaggaaatgcttgcactgtgagataaccaagacaccacagtggagggcagggccaatggggccgaaaacactctgcaatgcttgtggcgtgcgctacaagtcaggccggcttttccccgaatatcgccctgcagcgagtccaacgttttgtgcggccatgcactccaactcccataagaaggtccttgaaatgaggaacaagacaggcaccaaatctggctttgcaactgtttctgctgcctcaccagaactcattccaaacactaacagcagccttacccttgaatatatgtgaaagggggaaagggaggattctagttggaagaatctctaattc

SEQ ID NO: 30360 - DNA, 382 bp, Glycine max
  modified_base (371)..(371): a, c, g, t, unknown, or other
ggttgtcagtgtcttacgagggtagggctcagctcaggcatattctatctctacgccgctaactctctctcactctcgcgctctctctttcacaaccttcactttactctctctgctaaaatgcaaggaggatttcaatcatttttgtcacacgggaatgtcattagaaatgctgttctacaacgggtgcgcatggtgaaccccctgttacagccaattgtctcttcgcggtttgaatctgttacacctgctcgcattgaggagcatggttttgagagcaccacaatttcagacatcttgaatgataaaggcaagggtgctgatggctcctggctttggtgcaccacagatgatacccgttatgatgccgntaaatcgatga

SEQ ID NO: 30361 - DNA, 405 bp, Glycine max
gtcggtggtacagaccaaggatccggaatgggtctggttctgtccacaggaccggaagtatccaaatgggcatcgattgaacagagcgacaaataatgggtattggaaggcaacggggaaggatcgtagaatcaagtctgggaaggatttaattggaatgaagaagactttggtgttctacactggtcgtgcacccaaagggaataggaccaattgggttatgcacgagtatcgtcccactttgaaggagcttgatggtactaatcctggacagaatccatatgtcctttgtcgtttgtttaagaaacatgatgagagccttgaagtttcacactgtgatgaagcagagcagactgcttccactcctgtggcttactccacagaggaaatacaatctgatcttgc

SEQ ID NO: 30362 - DNA, 390 bp, Glycine max
  modified_base (111)..(111): a, c, g, t, unknown, or other
gagaccagagcaggatcaaaccaaaccctaatatcaacttcatctgtttcatttgattttgattcgaacccagacagagacatagcctctttctttcgtttggagaaacanacccctcgtttcaatcattgatcctttcctgttagatacgaattactcttccaatttcatcatggccaaaacctccttcaagcttcagcatcctttggaaagaaggcaggctgaagcttctcgcattagagagaaatatcctgatagaatacctgtgattgtggagaaagctgaaagaagtgacattcctgatattgataagaaaaaataccttgtccctgctgatttgactgttggccagtttgtatatgttgtccgcaaaaggattaagctcagtgc

SEQ ID NO: 30363 - DNA, 209 bp, Glycine max
gaatctaaagattaattaaattgagggaaaaaaaaaaaaaaacatggtggtgaaagtgtattgtccaacctatggatcccccaagagggtcctggtgtgtttgattgaaaaggaaattgagtttgaaacaatgcatgttgatcttttcaagggagaggataaggaaccttggttccttaagctgcaaccatttggatccctttctggta

SEQ ID NO: 30364 - DNA, 333 bp, Glycine max
gacgagtaaaaagaaagaaggtttttgtagtatagttaacagcatggagagggaggaagatgttaaagttggagcacagaaattctcggagaggcaagcactgggtacaggagctaagagtgacaaggactacaaggaggcaccaccagcacccttgtttgagccaggggagttaaagtcatggtctttttacagagctgggatcgcagagtttgtggccacattcttgttcctctacatcactgtcttgactgtcatgggtgtcaacagggcacccaacaagtgctcttctgttggcattcaaagaattgcatgggcttttggtggcatgat

SEQ ID NO: 30365 - DNA, 386 bp, Glycine max
ggcggcaacagagtagagaagagtgggcaagagtggcgacggagatggaagaactcgtctcctttctttcttccacgtcgcctcagatcacaaaagccgccgttgacatagtccgcggcttaaccggctccatggagggcttgcagtccctggcaaattactcaaacgccctcttacccgctttgtctcgcctcttaacgttacccaaggaggtttcggaggctgctgcggaggcgctggtgaacctgtcgcagaattcgagcctcgcggaagcgatggttggaattggtctggtcaaaacgacgatggatgttctgtacaagcccgagtgtagcattgctcgcttgcttgtcatgctgttggtcaacctcactcaactcgaagct

SEQ ID NO: 30366 - DNA, 378 bp, Glycine max
ggctgcaaatgtggaccgaactgctcctgcaaccgctgcacttgcaagtgaggtgttgggagagcaagcttcaagcagagatagcccttaattaggaataatgataaactattaatgtgtagctaaaaacttatgtattatgtctgtgatggttttcgtgcactctggtgttttgtgttaaacaaacatccttagaataaagtggtcatgtcttgcctttcagcaagttcaagtgttttggacttgtgatgggtgtgttaagctcatggttgcttcttttttttttttttttaatgtttggtaattggtcgcttctgtataaagttcggctaatctgaattatgaatctctgcttataatattaaatactattactcg

SEQ ID NO: 30367 - DNA, 395 bp, Glycine max
gacactcatctactccacattgtcctctcaccggttctccaattgaaaaggcttcttcatcaaaagaaaaatggctcaaatttgtttgctcttggtggggcttctctcaatgttctcctctgcctatggctacggatatggtggtggctgggttaatgcacatgccaccttctatggaggaagtgatgcctcaggaacaatgggtggggcatgtggatatggaaacctctacagccaaggttatggaacaaatactgctgctttgagcactgctttgttcaacaatggtcttagttgtggctcatgctatgagataaggtgtgtgaatgaccataggtggtgcctccctggctccattatggtcactgccaccaatttctgtcctccaaacaatg

SEQ ID NO: 30368 - DNA, 392 bp, Glycine max
gggagcagaggacaagatgggtagtgtgagttatagcaatctgaagaacgccatgatagcattcttggtccctctaccctccatcctattctacctctcattccaatcggccattagtactccttcttcttggtcttctctgtggacatggtgctatcaccaccctctgctattggccaatgtccttttcttcttcaatgtcaatttcctcttctggctcatcggcctaatccaatccagccactggatgattgacccgtattggacagtgatacctgtgatgcttgttcattactattcaactcaccctttggcacagtatcagtggtggaggtcgaggatcgtaacgtttgtgacttgggcgttgaagtgtaggctgatccacaactact

SEQ ID NO: 30369 - DNA, 421 bp, Glycine max
  modified_base (410)..(410): a, c, g, t, unknown, or other
gggttacgaggtaaacataatggtagtagcgcagctatttctccattagctggtaagctgtttgttgttattggggctggtggtgctgggaaggcacttgcttatggtgcaaaagcaaaaggagctagggttgtgattgcaaaccgtacctatgaccatgccagaaaacttgcttatgcaattggaggagatgctttagcccttgctgatttagataattaccatccggaggatggtatgattcttgcaaacacaacatcaattggaatgcaacctaaagttgatgagacgcctgtttctaagcacgctttgaaatattactccctagtttttgatgctgtctacacgcccaagattactagactcttgaaagaagcagaagaatcaggagccactattgtaacaggatnggagatgttta

SEQ ID NO: 30370 - DNA, 354 bp, Glycine max
  modified_base (344)..(344): a, c, g, t, unknown, or other
gatgcatggagaaaggtggcacctattgaagagaaacctgaaactccaatcagtttctgcaacgaacaggttccaaactgtatccattttttttttatacatctattttgttgctttaatcatagtgtctactaattttttgctctttggtgatttgttgcacatgtaatatatgcaaagttctctaagcaacataatttcttaatttcgtgtctttctttaatttgattctaactggagttaaagccttctaacatgccttgtgctcttagtcaagatcctttctatatattaatagcatgttttctttataaataaataaaaaacatctaacatgcatatgncttctttttc

SEQ ID NO: 30371 - DNA, 396 bp, Glycine max
ggttctagtgtgtgattgtttgttgttgtgactggttcttcttcttttgttgttctgtgtttgtgtttgttttttctctcacctgaaaatgtcttgctgcggtggtaactgtggttgcggaagctcctgcaagtgcggcaacggctgcggaggctgcaagatgtacccagacttgagctacactgagtcaaccaccaccgagaccttggtcatgggagtggcacctgttaaggctcaatttgagggtgctgaaatgggtgtgcccgctgagaacgatggctgcaaatgtggaccaaactgctcctgcaacccctgcacttgcaagtgaggtgttgggagagcaagcttcaagcagagatagcccttaattaggaataatgattaactattaatgtg

SEQ ID NO: 30372 - DNA, 331 bp, Glycine max
ggaagtgggaaagagacagaggcgaaaatggttgcgactttgagtcttccgatcatagacctctcttctccccatcgtctttccacagccaattccattcgtcaggcatgcgtggaatatggtttcttttaccttgtgaaccatggggtggacaccgattttgtgagcaaagtcttcgaccaaagttgcaagttcttctcgcttccggtccaacgcaaaatggacctggcccgcaaggaatatagaggctacactcctctctatgctgagacacttgatcctacttcactctccaaaggtgatccaaaagagacctattacattggtccta

SEQ ID NO: 30373 - DNA, 333 bp, Glycine max
  modified_base (266)..(266): a, c, g, t, unknown, or other
ggatctgtgggtggattgcatttgcagagagagagagagagagagagggaagacggttgtggggattcgatgggggccaccgttcactcgccgctagtcacttatgcttccgacatatctctgcttacactccgtcctgcgtttgtcatacttctatggtacaccatgactcttgctgacggatctgtttccgagacattccattatttaaggcagaatgggttgcagggtttgctacatatatggcccaccctcactcccaccgnctgcaaaatcattgcagtctatgctgcatttgaggcagcacttcagcttcttcttcccgggaaaacc

SEQ ID NO: 30374 - DNA, 221 bp, Glycine max
ggtccttaacagcatgccaaaaaaatccgcgcggttcgtttgatccgaacataaccatggtgttccaaagccctcttctgggcctgggtaacccttttcttgacattttcggcggcggcgattaaaacctcttaaaaaaatattatatcaccttcaacaatgcgattcttgccggggaccagcaccagcctatttattaagaattggctgagaaatataat

SEQ ID NO: 30375 - DNA, 181 bp, Glycine max
ggagtccttgccttggaccatattccaaaggggcggggggaaaataatttggaatcctgattaatggcttggcccaaatccttccagcttaaaccttgccttccaagggggggttgttgtccaaaccggaaaaaacctgtcatagaaaaaccctgaggaagcctttttgggtaaagggccc

SEQ ID NO: 30376 - DNA, 379 bp, Glycine max
ggactcaacaaattcttaagcactggtcaacctggagggagctcttgaggagtttcaaagagtggtgggaagatagaagattcaactttctggatcccacacccacgcacaggaatttacttcccaaaaaggcatgagtgggtgatggatgatgttccaaaagatgcagttcgtttaaaccagacttattggttcaaaaatgttgatggtgttgaccaccccagacactaaccataatatatgctccacaacattccaaaaataactacataatcgggaatcatatggtggtgaccaatctttatgtgatgtgttattaactagttttcatacattagaaaatatatgaatactatatatagtttaatagaatcatata

SEQ ID NO: 30377 - DNA, 415 bp, Glycine max
  modified_base (9)..(10): a, c, g, t, unknown, or other
ggaacacanntttggaaggaagctcttacgtgaaagctgctaaaaagttgcatgagattgatcctttacaaaagcctaaacaggaccgttatgctcttaggacttcaccacaatggcttggtcctctaattgaagtgattagattctctaccaagtcaattgagagggagattaactcagtcaatgacaaccctttgattgatgtgtcaaggaacaaggcacttcatggtggtaacttccaaggaactcctattggagtctccatggataatacacgtttggctcttgcttcaattggtaaactcatgtttgctcaattctctgagcttgtcaatgattattacaacaatggtttgccttcaaatctcactgccagcagaaaccccagcttggattatggattcaaggggagctg

SEQ ID NO: 30378 - DNA, 221 bp, Glycine max
gggccaaaccattttattttattttgggatcaaaggtgagggccttccatggctttcgcttgtgctttcttttcaattacaagtgttgtcatctgttccccgaggttccggcggaagaatggatcaagcgggtggtttcttaatggaaggaaatttaaggtgtaaaaaggacgagcaacaattggcggacgatctatgggcactacaaagagcgctattgc

SEQ ID NO: 30379 - DNA, 391 bp, Glycine max
  modified_base (292)..(292): a, c, g, t, unknown, or other
caagctatggtgggctaatcgggatagcattcgcaaagatagtactacaagtgggaatggtgtgattgtaactccccgtgggcaagcacctgcttttgttccatctcatcctgttgtcactgataggggtaaagacatccatcaagctgatgcttcaaagactatgtatgaagtatcatcgcctactgatcaatctaagcctgtcatcacagatggacccaaggttccacctcctttgcagaagaagcttgtaaacttagagagtctaaaggaagaactgcgcaagaagcangaaatgctagatcaaaaacgcaatgagttcaagcgccaagtgaacaaatttgagaaacaagcttctggactcaagggtgaagtatctactgagccagct

SEQ ID NO: 30380 - DNA, 401 bp, Glycine max
gtcacgttaaagtttctttcatgtttgaacaggcgactatccatttgggagcaactgagctgcttggattgtatttttcttcttctagaaaaaattacagaccctcaccacccagacttagttgtatgaacggttggccaccttccgttatccttgaaggagattgttcaaggatacaggttaccttagaggctgaaatcacagctgcgtataatttgaattccagcatttgctgcctctgaatatctctggaactttgtaagtcaacaaacatggctttacagaacattggtgctgcaaacagtgatgatgccttctacaggtataagatgcctaggatgattaccaaaattgagggcagaggtaatggcatcaaaactaatgttgtcaatatggttgac

SEQ ID NO: 30381 - DNA, 407 bp, Glycine max
ggagcgaagagtgaagagaatggctcccaagggtttaacctttctggctgtgttaatatgcgtttcagcactgtcactgagtccttctgttgcgggggaagggcaaaataatggccttgttatgaacttctacaaggaatcatgccctcaggctgaagacatcatcacagaacaagtcaagcttctctacaagcgccacaagaacactgctttctcctggctcaggaacatcttccatgactgtgctgttcggagttgtgatgcttcactgttgctggactccacaagaaggagcttgtctgagaaggaaacagatagaagctttgggttgagaaatttcaggtacattgagaccatcaaagaagcttttgaaagagaatgccctggggagtgttcatgtgctgata

SEQ ID NO: 30382 - DNA, 146 bp, Glycine max
caacaaataatccttcctctcggccgatttcataaaaaactctgccctcccctacatccattctcaacaacaaaccaatctttcttataaaaaaaatctctcactttttccaacttctacaattccaacactctccatctttccca

SEQ ID NO: 30383 - DNA, 108 bp, Glycine max
gatttccacatacaatggatacccctgcctcggggcacactgcacatcctcctatcgccgctgctttattcattctcaaaatcaaaccaatttttcttagaaaatgat

SEQ ID NO: 30384 - DNA, 426 bp, Glycine max
gacacgcagttgtattgtagaactgaacaagggggtctctttctctttctctgtctgcttcttcactttctctcgtttcaatcgaaaaaaatcatgggcagaaaattcttcgtcggtggcaactggaaatgcaatgggaccactgaggaggtgaagaagattgttactactttaaatgaagctaaagtccctggagaagatgttgtagaagttgttgtgagccctccttttgtgttccttccttttgtaaaaagtttgctgcgccctgatttccatgtctcggcccaaaattgttgggttcgcaaaggtggtgcttatactggagaggttagtgctgaaatgcttgttaatttgggaattccttgggttattattggtcactctgaacggaggcagcttttgaatgaatcaaatgagtttgtggga

SEQ ID NO: 30385 - DNA, 405 bp, Glycine max
  modified_base (270)..(270): a, c, g, t, unknown, or other
  modified_base (291)..(291): a, c, g, t, unknown, or other
  modified_base (360)..(360): a, c, g, t, unknown, or other
ggatcgggggtttcttttgaaaaaaagggaagccaggcggcattcttcgtcaggaaaataaactccaattttcattctaggttaggatttccgtctgccaaatttgtgaaatgtgatgtgagtaatgcaggggatctagctgctgcatttgaaaagcattttttgacatatggaggactagacatttgtattaacagtgcgggggattagtagttctgtaccattccgtgatgatcaaaccgatggcacccgaacatggagatacactgntaatgtgaatttcactgctgntatcgattccactcgccttgcgattaaaatcatggaagcttccaaaaggcctggtgtgattatcaactngggttctgcttctggtctttatccaatggtggctgacccaattta

SEQ ID NO: 30386 - DNA, 384 bp, Glycine max
  modified_base (319)..(319): a, c, g, t, unknown, or other
ggaaggcaggaaaggtagggttttggtccttgccgaaggaaagagaaaagaggatggtgtaaggttcgggaatctgcccaaaccccgtggtggtggacccccgccacaacatgctgggtcggctcgcctcgattgtggcaaaggagctgctgaacgaacaaaaagtggtggtcgtgcgatgcgaaaagatttgcatttccggtggtctggtgaggcaaaaaatgaagtacttgaggttcctccgcaaacgcatgaacaccaagccttcccacggccccatccactttcgcgcacactgcaagatcttctggcgcaccgntcgtggaatgataccacacaagacaaagcgtggggaagccgctctcgctcgtttgaaggtttatg

SEQ ID NO: 30387 - DNA, 222 bp, Glycine max
caccgaagggggtgtcccagtcccattgattagcccttcttttgggaggaggccaaaccttcttttccccgttctttatttaattttaaccaccaacccattttttttaaaaaatggaggggggcttggggccacctgggccatccatcacttccccgcttggccaatgagataaaaaagcttgtgcttctccatggtttgccttaaaagctgaacttgaaa

SEQ ID NO: 30388 - DNA, 71 bp, Glycine max
aggcgttagaacacctccgaaggggccaccgtttaggctaacaaacgaaaaggcaaagggcggggtcccaa

SEQ ID NO: 30389 - DNA, 395 bp, Glycine max
gagagaagagaaggttacagaaaaacaaaaacctggctgtgtttctccgtcgtggcaattgaaggaagcactgactgtctctgcaactttagtcacattcacatggcagcaacaacatcagggaagattatccaaaatgtttttgtttcacactgccaccaacagaatacacggggtcgaagggactattattgatttggcccatctccgctagggaagttggcatggactgactcttccatgcaattgcgcactttattcaaaccccagaatcattttagtttccagagaaaatttcactgcaatgcttctgcatctgctactgctgtgccatatctagacaagacagattttctaaagcttcaaaatggcagtgacattcggggtgtggctgc

SEQ ID NO: 30390 - DNA, 336 bp, Glycine max
  modified_base (278)..(278): a, c, g, t, unknown, or other
gatagtgagtaaaaagccaagagacgagaaccgggatagccatctcatctcattcatttcaatggccactcaagggcaagtcattaccttccaaacttcggtgggctgggaacccaacaaggccttaactgtccaaaaccttcaaggggcttccccctaaggccgcgagggccgggttcaaattctcttcacccgttcttgccacaccgatgcttacacttggggcggcaaggatcccgaaggtctcttcccctgtattcttggccatgaagctgcanggattgtggagagtgttggagaaagtgttactaatgttcagcctggggatcatgtcat

SEQ ID NO: 30391 - DNA, 393 bp, Glycine max
gatggtatatcattccaagaatctcagctgcagtaaacagcgaccatgaaactaatgacagcaacaacaacgtttgatgtctctgccacttgcttccgtgcccctcctccttcgtgctcaatgaatccatgccacaccagtttttcagttataaactccctgaatcctcacaagggacgacggataagcgttgctgttccacccaagtttccaaacttccggagggaagcatctctgcaggggaatttggaggctattagagtcccaacttcggtgcctgtgcgtgtagcatacgagcttcttctagctggtcatcgatatttggatgtaaggaccccggaagagttcgatgctggacacgctcctggcgcaattaacataccttatatgttc

SEQ ID NO: 30392 - DNA, 404 bp, Glycine max
  modified_base (338)..(338): a, c, g, t, unknown, or other
ggagagagagagagagagggaggcacttggaatccaaaaatgagagaaatcatcagcattcacataggtcaggccgggatccaggttggcaactcctgctgggaactctactgcctggaacatggcatccagcccgatggcatgatgccaagtgactcctccttcggtgtagcccacgacgccttcaacaccttcttcagcgaaaccggatccggcaagcacgtccctcgcgccgtcttcgtcgatctcgagcccaccgtcatcgacgaagtccgttgtggcacttaccgtcaactcttccaccccgaacaactcatctccggcaaggaagatgccgncaacaactttgccagaggccactacacccgtggcaaaagatcggagatctgtgcttggatcgcgtc

SEQ ID NO: 30393 - DNA, 389 bp, Glycine max
ggcgacagagagggacgatgacggacgaaaccgaagaattggaaccgttgtttgattacagccgggttcagcctctgaaccccatcgacctcgatgatgattttgatgattacgaggatgtgatttgcgttgatagtaaaaagaggaagaattcccaggctgttgggaatgagaagactaatgggaaaggagtaacagtggtggacattgaggatgatgattggttgcctcctccaccaaagatcgcaagtaatgcacagaagaccacggacgaggactcaactttgaaaaaattgagattaaagaagcaggaacttgcctggtttgctgaatcagcaaaagaattgttaaaagatgttgaagagtcatcaaaattgggaaataataat

SEQ ID NO: 30394 - DNA, 370 bp, Glycine max
ggcacttcaattgcaatcaaattagttcattcggtttgcgcagttccctacctctcctttcaagatgcagatcttcgtcaagaccctcaccggaaagaccatcacccttgaggtggaaagctctgacaccatcgacaacgtcaaggccaagatccaggacaaggaaggaattcccccggatcagcaacgtctcatcttcgccggaaagcagctcgaggacggccgtaccctcgccgactacaacatccagaaggagtcaacccttcaccttgtccttcgtctccgtggtggcatgcagatcttcgtcaagactctcactgggcaaaccataaccctagaggtcgaaagctctgacaccattgacaacgtc

SEQ ID NO: 30395 - DNA, 400 bp, Glycine max
atagcattggagttcaatgataagctcaagaaggtgaccattaagctaaaccaagagctccctggactcaaattggtgttttctaatccttattacattatgttgaacatcataaaaagacctcaactttatggatttgaatcgacctcagtggcatgttgtgctactggaatgtttgagatgggttatgcatgcagcaggggccaaatgttcagttgcactgatgcttccaaatatgtgttttgggactcttttcatccaactgagatgacaaatagtatcgttgcaaagtacgtggtgctgcgtgttttatatcaattcttacaataaacaaatagctactagtgaaattttatttatgtacggctatctcttcatgtctgcacattcgccataaagt

SEQ ID NO: 30396 - DNA, 424 bp, Glycine max
  modified_base (383)..(383): a, c, g, t, unknown, or other
ggcttcagttggtgtggcaccaacatcatgaggcttgagagaatccagtggtgttgataggttgccagaggagatgaatgatatgagaattagggatgataaagaaatggaagccaccgttgtcgatggtaacggaacagagaccggacatattattgttactaccattgggggtagaaatggtcaaccgaagcagactataagctatatggcagagcggattgttggacatggatcatttggggttgtcttccaggctaaatgcttggagactggtgaaactgtggctatcaaaaaagttcttcaagacaagaggtataaaaaccgggagctgcaaacaatgcgccttcttgaccacccaaatgttgtctgtttgaagcatngtttcttttcaaccaccgaaaaggatgaactataccttaat

SEQ ID NO: 30397 - DNA, 430 bp, Glycine max
  modified_base (391)..(391): a, c, g, t, unknown, or other
ggccaccggaggggggcgccaccagatgatggaaacgacggcaaagggaggcgctgtcgttgcgccaatcgcggcgttgttgttggtggtgctactcgcggcgagtgtggtggtggaggctcaggagaactcggacgtgaagacgctggtgaagcacatgcacgggaagaagtactgcgacaaaggatgggaatgtaagggctggtcaatttactgttgtaacctcactattactgattatttccagacctaccagttcgagaatctattctccaagcggaactcgccggtggcgcacgccgtccgattttgtgactaccactcgttcatcgccgctgccgcgcttttcgagccgcatgggttcggcaccaccggggacaagacgatgcanatgatggagattgcggcgtttctcggacacgtcggcagc

SEQ ID NO: 30398 - DNA, 363 bp, Glycine max
ggcccctttgaccaaaattaaggttttgtagtgtggcgggaaaaaccaccattgcccccgaaaataaaacgtaaggttagaaaaaaccttgaattgataaggggaatcggaaagtactcgaggtcgcagatgtaccacaagaggggcatttgggctatcaaggccaaaaacggtggcgttttacctcgccacgaccctaaacccaagcctgaagctcctgctgaaaaaccacccaaattttaccctgctgatgatatcaagaagccccttgtcaacaagcacaaaccgaaaccagctaagctcagggctagcattactcccgggacagtgttgattctcttgcccgtagatttaagggaaaga

SEQ ID NO: 30399 - DNA, 373 bp, Glycine max
  modified_base (307)..(307): a, c, g, t, unknown, or other
gacccaagaacagagaagaatcagagaatggcaactatgactggtgtgagcctttcatgccccagggttttcttcaacgcatcaagctcaccgcaaaacgcgcatgcttattgtattttgtccagcagattctatgacttgacaggactgcagaatggaattctgaagcgagggagagagattttcctcactggttgctacctacgaactcccactggaggttctggacattcacgtcttttgccaacagagtatcttgtgattctattggatgaagtaatggtcaaagattctttaattttaaatntgtccactgtgaagtttaattgggctaacaagaggagtgagtgagtaggctcaacatacataaatg

SEQ ID NO: 30400 - DNA, 427 bp, Glycine max
  modified_base (361)..(361): a, c, g, t, unknown, or other
  modified_base (383)..(383): a, c, g, t, unknown, or other
  modified_base (385)..(385): a, c, g, t, unknown, or other
ggttcaaaggaaactatcaagggggcaagggggggaaagattttattaataaccacttgggtttcaaaagtatgtatcacaaggatcctgaaactggttctgctcgtattgttggatttgaggtcaccccaaacagtataaatcacgaatacaaggagtggaatgacaagaatccacaggtaacaacatgcaataaagataccaagaatttgatgcaaggtagtactgtcccacaagaagtagatacaaacaaggatatcgtattcacatatgatgtttccttcaaggaaagtgatatcaaatgggcatcacggtgggacacatatcttttaatgaatgatgatcagatccactggttctncatcattaactctttgatgatngntcttttcctgtctggaatgggtggcatgatcatgatgagaac

SEQ ID NO: 30401 - DNA, 366 bp, Glycine max
gggtgacagaggagtatattaattaatatgtatgtgatttattgaattcgaagagaacaacaacacacacagagagaggtgtgaaaaggtgatggtttttggagcttatgcaacgtcttgcattttaagaagcacctaattacgaatatctatcttagcacacacaaccaccaccaccaccaccactactccaccattgtcactgccactgccaccttcaatttcaacctttctccaaaaataacataaaatcataatccgaatatctcagcattctctcattgctgcatcagctactcgcattttcgctttttttttccttccgggtgtccgcacttttcaatggaccgacgctggccatggaag

SEQ ID NO: 30402 - DNA, 340 bp, Glycine max
gagtgtgtgagttcattaacatatacaaattctgtgtgttgtgttgtgtacttgtgttaattgtgttgttgttgtaggaaatttaagtgaagagagaatgatgatgaagtctgctatgtgtgcattggtgcttgtggcactggttgtggttgaagtggggcccatggctgaggctgcggtgacttgcaacccaacacagttgactccttgtcttccggcaattaattcaggttctgcaccttcgagtgcttgttgccagaagctgaaggagcaaaagccatgcttctgtggctacctcaaaaaccctagcttgaagcagtatgttaactctcctaatgcc

SEQ ID NO: 30403 - DNA, 334 bp, Glycine max
ggcacacaaccactctttcttcttcttctctgaagagagcctttgctttttctttaggcctttccgaattaagtacttgtttcattttctctcgaagcaagaaaaatgttcatcgagagtttcaaggttgagagtcctaacgtgaagtacacagagactgagattcagtccgtgtacaactatgaaaccactgaacttgttcacgagaacaagaatggcacttatcagtgggttgtcaagcccaaaactgtcaaatatgaatttaaaaccaacacccatgtccctaaactaggggtaatgcttgtggggtggggtggaaacaatggctcaaccc

SEQ ID NO: 30404 - DNA, 356 bp, Glycine max
  modified_base (59)..(59): a, c, g, t, unknown, or other
  modified_base (328)..(328): a, c, g, t, unknown, or other
gggaggaaggaagagatccttgtgttgtgggttgaggtgagaagggaagggatgtgganttcaacttcaagcacagcagcgattccctccgacgaggaacctagcgaatcctcctcctcgtcctccttctccacctctctcttcaatttctcttctggaaacccgagaatcgaggagacccgtggcctcatgcatctcttcccagacgacactccttctactctacccgttggacggaagcctctcgtttgcgttgtcggcgtcccaaatcacatgacctatgcggatttctgccagttctgtggttccttcattcagcacatgctanagatgcgcatagtcaggatggatgggat

SEQ ID NO: 30405 - DNA, 344 bp, Glycine max
ggacgagaaatgagtagaaaacaaatgaaatggagacggtgttgtaagaaagagatttggggaggtttgactttttgagagttggaagatctcatcctctctatattcctcttctcgtctcagagagaaagagaaccagaaaagaccaaagcaacaacatcaccagacaatacaaacgcagatagatcactttgacgccaccctgaatcttgatacctttgaccgcaacaaaattcttaattgatcactgggtatgtttttgatcgtgcaccttgtgggccagtaatcgttcaaaacgtgaacaagtcttacttttgattccgaaatcctcttatcacttgatg

SEQ ID NO: 30406 - DNA, 401 bp, Glycine max
  modified_base (326)..(326): a, c, g, t, unknown, or other
gaggaagtgattgagaagatcatcgccaacgggggcgaggaagaggttctggggaaggccatacaggaacacgggagagggaaggttctggaaacagtggttgagattcaggacaggcatgatgctgccaaggaggtggagaagagtctactggagctgcaccaggtgtttcttgacatggctgtgatggtggaggcacagggtgagaagatggatgacattgagcaccacgtgctgcatgcttctcactatgtcaaggatgggaccaagaatctccagagtgcaaaggagtaccagaagaagagcaggaagtggatgtgcattgngatcattctgttgctcattcttattctgtttattggtattcctgttgtcaccagtttaagcagttcttgagtttt

SEQ ID NO: 30407 - DNA, 346 bp, Glycine max
  modified_base (172)..(172): a, c, g, t, unknown, or other
gacagaacaatagtagcaagcagagccccaagacgagcgttaccttgcgccgaagggccacagatggttgaaaccgatatggatgccgaaactgttgcaaatgtggttccaccaaaggagactccaaacagtgttcccatctcttatcattcctcacactcacaccctcctnttaatgagaggattatttcatccatgaccagaagatctgttgctgcacacccgcggcacgaccttgagatagggcctggtgctccaacgatcttcaattgtgtgattgagattgggaaagggagcaaggtgaaatatgaactggacataaaatcgggtcttatcaagatcgacc

SEQ ID NO: 30408 - DNA, 319 bp, Glycine max
agggggcacaagtgagttttgtgatcgagataactagagacggtgtgatgaaaatgaaggtccttgttttcttcgttgctacaattttggtagcatggcaatgccatgcgtacgatatgttccctctccgaatgaacactggctattgtgcccgtactccggaggtgaaatgcgcaagttggaggcttgctgtggaagcacacaacatctttggctttgagaccattcctgaagagtgcgttgaagcaacaaaggaatacatccatggcgaacaatgtagatcagactccaaaacagttaaccaacaagcttactttta

SEQ ID NO: 30409 - DNA, 166 bp, Glycine max
ttgtaaaacacctcccaagggggcaccgtataagttaaaaactgaaaagtcaaagggcgggcttccttaacatcaatctaatttttttcaccaaactctctcttcctgtttctgttatttccaaccaggtttaatttcatttccccaaaccctccattttaaattt

SEQ ID NO: 30410 - DNA, 410 bp, Glycine max
ggtgttgtgttggtgttgtgtggtgtgtcgttgggaggggggaactcttggtctagctttggagccatcccaccaatccatcacccgatcacatttcaaagccccaacacatcacaatttacacaacacacatcacaattccgaacttagtgtacaacgaaagtccaacacacgaatcaaatcagacacacaacacaaacacaacacacactcactctccgttatccacacacaccattactctgttctgttctgttctgttctgctctgttctgtttcccaccacacccccccatggattgttggtactctcctcaccctctccatgatgaattcgagaagcttgtcattcgaatgaaccccccaagagttgctgtggataacatttcaagcgggacagacactgtcat

SEQ ID NO: 30411 - DNA, 323 bp, Glycine max
gggtgaaagagttgaattgattcattttcatattccacaaccatggcggtcccatcctcttctctcacaaacaacaacattcattcttatatataaacacaacgaacgatacgagggaaaatctcatcgcatctctcattgtatttgcctttgcacatcatcaaccacactcaatctcttgcttcattcccaaacctcttattcccctcaagtatctacaaagctaaccttttttccttttttatcatcacttccaagagttgaaagataaaagccttgactttcttagcttcaaccaaatgcgatccccttcttgaaggata

SEQ ID NO: 30412 - DNA, 317 bp, Glycine max
accacaaaggggagtagcgatggagaaaaagaagggtgagctaaaggcaagggtccttcctttcctttccactaatcacataaacccgctagtggacatggccagactcttctccatgcacgacctctacgtcaccatcatcaccaccgcacataacgccaccgttttccaaaagtccatcgatttagatgcgagtcgcgggcgccccatcagaacgcacgttgtcaacttccccacctcacaagtgggtctccccgttgggatcgaagccttcaacgtgaatacgcctcgggaaatgacccccagaatctacatgg

SEQ ID NO: 30413 - DNA, 134 bp, Glycine max
ggtgggaaggttagaagaagcatgtgcatctggggcagtgataatggcaggtggaacagccagcataggcgaggatccagcgctggatcagttcatggaggcttactgtgagatgctgatcaagtacgagcaag

SEQ ID NO: 30414 - DNA, 76 bp, Glycine max
caaaaaaccgaccagaaaggggttccttttattgtgaacctctatttctaactggcggggttttaaaaactgttgc

SEQ ID NO: 30415 - DNA, 308 bp, Glycine max
  modified_base (39)..(39): a, c, g, t, unknown, or other
ggaatcacagtggtgccttatcgctgtgggtttgagcgncttccttctcttatatttctttttttttttgtcttcgccgcacgccgaaacaatggccggaaaaggagagggtcctgctatcggaatcgatctcggaaccacctactcttgtgtcggtgtgtggcaacatgaccgagttgaaatcatcgccaacgaccaagggaacagaacgacgccgtcttacgtcggcttcactgataccgagcgtctcatcggtgatgcggctaagaaccaagtcgccatgaaccccatcaacaccgtcttcgatg

SEQ ID NO: 30416 - DNA, 106 bp, Glycine max
cagttggagaaggtgaagacggtgaagaccgagggaaggaaaccggttgctgttcctgccaataaaagaactcgagcaagcaacagcaatggaggtccaatgccac

SEQ ID NO: 30417 - DNA, 406 bp, Glycine max
  modified_base (387)..(387): a, c, g, t, unknown, or other
gtatcatttgataatccaatgggtgtctgattctgtggttgaataaatagacttttttaattttaaatggaggaatctcgagcatatttagaactccatagatctcgacaccaggacaccctataccctctttttttccgggaatctatttacggactagcttgtggtcatgggtccatttttgtagaaaatgtcggttataacaataaatttagtttactaattgtaaaacgtttaattactcgaatgtatcaacagactcatttcatcatttttactaacgattctaacaaaaatccttttatgggttataacaatcatttttattctcaaataatattagaaggttttggtgtcgtcgtggagattctattttccctacaattntgtatatcttccttaaggg

SEQ ID NO: 30418 - DNA, 330 bp, Glycine max
gacaataacaaactaaccaattcaaagttcacacgcacacacagcttgggaagaaaatcgagaattttccgagaaaatccgaagaaggcgggccatggtttccccggaaaacagcaattggctgttcgattacccgctgatcgacgacgttattcccgtcggcgacgcctccttttccgtctccgcctccgccttctcccggcccccacctcccgccaatgtcagtgttgaaattgatgcttcgcttggggattctgatggccccaaagatactgctttgaagaaaagggctagatgtgattcaagtactgcttctagctctaaaggctt

SEQ ID NO: 30419 - DNA, 378 bp, Glycine max
gaaagaaagaggtggtaacacgaagggcgcgtggcagccgctggtttaaccgaaaagaaagcaactttgtcctacatcagaggcaacggaaaagaggatcctttctgcttcttctcttctcttccacacaaagacatcgtttcattgctctctctcttgtgcggacacaatttttgatggggatatacctcagcactcccaaaacagagaaagcctctgaagatggtgagaacgacaagcttcgcttcggtttgtcttccatgcaaggctggcgtgctaccatggaagatgctcatgcagctcatccatgtttggacgagtccacgtcatactttggtgtttatgatggccatggaggcaaagcagtttcaaaattct

SEQ ID NO: 30420 - DNA, 332 bp, Glycine max
  modified_base (272)..(272): a, c, g, t, unknown, or other
gagatcagaacagaacacagacaaacagaggaagagagaaagacccaagatgggcctttgctttggttgcttcggcgtagacaaacgcatgagcaaggaagaagagagattggcctctgaagaagcgcgtgccaaagctgctgaagccgcacagaaaaggcaagagcaatttgagaattctgcagcaggacgagctgctcgtgcacagcaacaagcaatggcaaagcaatctgcaaacgccaacaaagggcgaaccagttctaaagtggcanatgggttgaggttagacaatctgtctgttggagtaaacttttattacgttatcgatgaca

SEQ ID NO: 30421 - DNA, 435 bp, Glycine max
ggttctagtgtgtgattgtttgttgttgtaactcgttcttcttcttttgttgttctgtgtttgtgtttgttttttctctcacctgaaaatgtcttgctgcggtggtaactgtggttgcggaagctcctgcaagtgcggcaacggctgcggaggctgcaagatgtacccagacttgagctacactgagtcaaccaccaccgagaccttggtcatgggagtggcacctgttaaggctcaatttgagggtgctgaaatgggtgtgcccgctgagaacgatggctgcaaatgtggaccaaactactcctgcaacccctgcacttgcaagtgaggtgttgggagagcaagcttcaagcagagatagcccttaattaggaataatgataaactattaatgtgtagctaaaaacttatgtattatgtctgtgatggttttcg

SEQ ID NO: 30422 - DNA, 66 bp, Glycine max
gggagaagaggtgactacaacaccaaaaaaaatagttcagcttttgggtgagataatccaagctct

SEQ ID NO: 30423 - DNA, 313 bp, Glycine max
gggagaagaagttcctacaacaccaaaaaaaatgggtcagcttttgaatgagataattgaagctctttcttctgtatcatctcctgaactggccctgagactgtatctgcaatgtgctgaggctgctaatgactgtgaccttgagcctgttgcttatgaatttttcactcaggcatttgtattatatgaagaagaaattgcggactccaaagcccaagtaaccgcaatacatttaattattgggtctcttcagagaatgaatgtctttggcattgagaacagggatacattaacacacaatgccacagggtat

SEQ ID NO: 30424 - DNA, 410 bp, Glycine max
  modified_base (229)..(229): a, c, g, t, unknown, or other
agtgtgtgagttcattaacatatacaaattctctgtgttgtgttgtgtacttgtgttaattgtgttgttgttgtaggaaatttaagtgaagagagaatgatgatgaagtctgctatgtgtgcattggtgcttgtggcactggttgtggttgaagtggggcccatggctgaggctgcggtgacttgcaacccaacacagttgactccttgtcttccggcaattaattcangttctgcaccttcgagtgcttgttgccagaagctgaaggagcaaaagccatgcttctgtggctacctcaaaaaccctagcttgaagcagtatgttaactctcctaatgccaaaaaaaccgttagttcttgtggtattgcctatccaacttgttaagcacctcttatatatatatataaaat

SEQ ID NO: 30425 - DNA, 406 bp, Glycine max
ggaagaacaacggcagggtaagtatattgggaatggtggtggatgagccgaagctctgtcttatgaaaaaattccagaactggctctgaaactgtgtcacaaagtgtgcatgggcaattgaagactatgaccgtgagcctgatgactatgcaatcgacactcaggcactcaggatacttggataagaattcacagccgacgatgtcctttttaaccgaatacttactactatgactgctttctagagactgcatgtctttggcattgataacatggatacattaacacacatggccgcatggtatttagcatagcttttgaagaaacctgatcagtgccgagcagtttatgcatgctctcatctcttttgggttgatgatcaagatggtattaaagatggaaaagg

SEQ ID NO: 30426 - DNA, 118 bp, Glycine max
acctacgaaggacaacacacgcattcaagcccagttatgggtcgctccaacaactttggttcggaattatgtctggatctgctggaaactacatgtcccaatattatcagcagcagca

SEQ ID NO: 30427 - DNA, 383 bp, Glycine max
  modified_base (332)..(332): a, c, g, t, unknown, or other
gagggtggaaattgaagaagaagaagagaaagaaagggaaagggagagggatcagctttctattttgacccttttgattgctacgttcaggaaatctttgattgggtgcagcaccactacaacttcttcttcttcttcttcttcttcttccatggagattgggtggccttccaatgtgagacacgtggcacatgtcacctttgatcgcttccatggctttctcggtttgcctgttgagttcgaacccgaagttcccaggagacctcccagcgctagtgcaaatgtttttggagtttcaacagaatctatgcagctttcttttgatgccaganggaatagtgtacctacaaatactgctgtaatgcaaagacatttgtatgcac

SEQ ID NO: 30428 - DNA, 312 bp, Glycine max
gacacagagtgggatatagaatcactgaagagcttccttcaatggcgggttcttctctctctggtactcctctttcgctctcaaattcttccccctctctatcttccaagccaaagattccatctttgtgttttctctctggcaacaacaccacattgagggtaacatgcccaaaacctctgcactcatccactgttgttcatgttgctaccgaagcgttggattcatcccctgatcccttggacccactttcaaaaacccttgatgatgactctgacgccaccacctttgaggttggtgacttggggactc

SEQ ID NO: 30429 - DNA, 188 bp, Glycine max
gcaattaacgggagtgtaaaggtgcataccaaattgcaaaacctaggtgatatgctaccacgccttaatataagcgaatttgatatctaccaaccactgtacgaatagtgcacaaaaccttatgaaaacggattttttgaattatggaacgtttggtgtggaacggggtggataaaactatttatttt

SEQ ID NO: 30430 - DNA, 404 bp, Glycine max
  modified_base (309)..(309): a, c, g, t, unknown, or other
  modified_base (349)..(349): a, c, g, t, unknown, or other
ggtagcaaagggttgctgagaggagcttcgttaactgcaaacgcagtgtggcatagaagcagtttcttcccaaaggtaacggttagcgtccaccgcaagttggtgaaatttcgaagcttctcattaaccaccacttgctcctctcttctacctccggatttgccgcgtttggcaaaaacggctcaaatttcacttaccccaaacgaggttgaagaaattactcccaaaattcaacaagttatagaatggtttggacagcttcagggtgttgatcttgaaagtgttgaaccctcgatcagagcagctganaatgcgtggttagtgtggttgttttatgccaatccgtttncagaggcacattaaatgtcaatcccatgctcgctcatggattattagcattcaat

SEQ ID NO: 30431 - DNA, 388 bp, Glycine max
gataccaaaaacaaaacaagccaagtgaaagagagaagaaaagtgaaagacaatgtcagggatcattcacaagattgaggagacccttcatgtgggaggccacaagaaggaggaggagcacaagggtgagcagcaccatggtggagaatacaaaggggagcatcatggtgaacacagtactgaatacaaaggagagcatcatgttggtgagcacaagccggagcaccatggaggagaagagcacaaagaggggttcctagacaagatcaaggacaagatccacggcgaggagggtggcgccaccgccgagggcgagaagaagaagatgatgaaggagaagaagaagcatgaacatggccatgacagcagcagcagcagtgacagtgat

SEQ ID NO: 30432 - DNA, 398 bp, Glycine max
gacacaagattgagacacgaaacagaaaatgccaggactcacagcaccttccgattactcccaagaacccccccgccactcttctcttctcatcaacgccaaggaacctttcaatgcggagccaccgcgtgctgcgttggttgcttcctacgtcaccccttccgatttcttctataagaggaaccacggtccaatccccatcgttgagaacatcaacagatattccgtgaacgtgtccggcttggtggagcgtcccaaacagctcttcatgaaagatatatggatgcttccaaagtataatgtcactgccacgttgcagtgtgcaggtaatcgaaggactgctatgagcaagaccaaaacagtgaagggagttggctgggatgtttctgctattggaa

SEQ ID NO: 30433 - DNA, 301 bp, Glycine max
  modified_base (286)..(286): a, c, g, t, unknown, or other
gagagtgaaggggataataatatcaagtatgtcgcagctgagttggcaactgacatagtcattaatgttggaaatgtaaaatttcatctccataagtttcctcttttgtcaaaaagtgcacgcttgcaaaagctgattacaaacagtaatgaagagaacaatgatgaagtccatatccatgacattcctggcggatctgctgcttttgaaatatgtaccaagttctgttatggtatgacagtcactcttaatgcatacaatgtcgttgcagctcgctgtgcagcanaatatcttgagatgt

SEQ ID NO: 30434 - DNA, 308 bp, Glycine max
gagtgtgtgagttcattaacatatacaaattctctgtgttgtgttgtatacttgtgttaattgtgttgttgttgtaggaaatttaagtgaagagagaatgatgatgaagtctgctatgtgtgcattggtgcttgtggcactggttgtggttgaagtggggcccatggctgaggctgcggtgacttgcaacccaacacagttgactccttgtcttccggcaattaattcatgttctgcaccttcgagtgcttgttgccagaagctgaaggagcaaaagccatgcttgtgtggctaccttaaaaacccta

SEQ ID NO: 30435 - DNA, 262 bp, Glycine max
cttagaaaaggaaacagaaaagtcaaaaggtgacaaaacagagaaggaacaaggtgatgcagccaactcacaagagaaaaccctgaagaagccagataaagtgctaccatgcccccgctgcaaaagcatggacactaaattctgttactacaacaactacaatgtcaaccagccgcgttatttctgcaaagcctgtcaaagatactggactgcaagtggcaccatgaggaatgttcctgtgggggcaggacggcgaaagaac

SEQ ID NO: 30436 - DNA, 414 bp, Glycine max
gaaagggaagcagaagaagaagaatgatagttagaactccaccgccacccaagaggccacgcgccgatggcgatgacggacagctagtcatctacgaggatccgccggagtcatcccctccttcggagcaaatgctctgcacctatcaatgtcgccaaatggtcaaatccgattttattgatgccttaagcaaagctgaaaatcaagctcgtcattatcaatccaagtttgagacattggagcctcatttccgcaaagttgaatctgagaggaagaaatttcaggaccaattcttatacgcccaacaggaacttgcagctgcaaaaggccgcgagcaggcactccaagaccaactcttgaaggaggccactcagtctcaagaacgattaagaaaacaaattcaattaaacactc

SEQ ID NO: 30437 - DNA, 433 bp, Glycine max
gatcaaacagatggtggtgatggctatgtttctgttgaagtatctcccaggctcgctgatgacactgagggaaccatagaagctgcaaaatggcttcataaagtggttgatcgccccaatgtgtatattaagattcctgctacagaggcatgtgtgccttcaattaaggaagttattgctaatgggataagtgtgaatgtgacgctgatattctctcttgcaagatatgaagctgtaatagatgcttacttggatggtcttgaggcatctgggttaaatgacctctctagagttacaagtgttgcctctttctttgtcagtagagtggacactctcattgacaaggcccttgagaaaattggcaccccagaggctcttaatctacgtgggaaggcagcagtagcccaagcagcattggcttaccagctctacc

SEQ ID NO: 30438 - DNA, 235 bp, Glycine max
acgtgccatcacttgcctgtctcgggtgcgggttttaatggtggagctcttgttgctagtgaaattaagactccattaaaaatgaaggttgaaggtggaagttattgaatgttgaattattcaacttgaggagttgccaagttggaacttacttttggaagtattcatcttgtgggtgtgattactgagttgacgagtgtccaaattaggttggattggaggcattcaaaattag

SEQ ID NO: 30439 - DNA, 391 bp, Glycine max
ggacctaatgccaatcctttagatctctttccccagggccttccaaatgttgggtctggtgctgctggtgctggctctttagactttcttcgcaacagtcaacagttccaagccttacgcgctatggtacaggctaatccacaaatattgcagcctatgctacaagagcttggcaaacaaaatcctcatcttatgcgattgattcaagagcatcaagttgacttccttcgcctaattaatgaacccgttgaagggggtgagggaaatatactgggacagctagctagtgccatgccgcaagcagtgacagtcacccctgaggaacggcaagcaattgaacgtctcgaagcaatgggatttgatcgtgcaactgtattggaggtgtacttcg

SEQ ID NO: 30440 - DNA, 167 bp, Glycine max
gcattttatgagtgctttaacaaatacactaaaggggaaacttggggtgtatttgaagaaattatttcccatattaaacaaatttaatttaacacacactaattatttattttgctatctcattcatcgctaacttgctgcactcacttacctacaaattagaccca

SEQ ID NO: 30441 - DNA, 371 bp, Glycine max
ggtgaacaagagagataaaatgaagttagggacaaaaaaatttgttgattatgtcttataaatagtaacaaaagtagtattgttaaaaacaatattagtagaagtgttaaaattcaaatttaaaaagagcaaatagatacataatattatctctataggctgtacaattgaatctaaatcctaagttcaagacattgattctcacatagtcacgtaaaaacaggccttgttccaaataatcaatttccaggagcatggaaaagtcatcagcatcctctccatgcaaaagcagcaagaggtatagctggcttgcaattgtacattggcaggatacttgttcctctaaatgatggcagaattgcagaattaca

SEQ ID NO: 30442 - DNA, 135 bp, Glycine max
gccgactaaggcgggtaggaacaggttctctacgggcccatccgttatataatggaacgcttcctcattgcgcctattgaccacgggaaatccgcggtggggggtacagtgattgaagttaccggcgcggtgcac

SEQ ID NO: 30443 - DNA, 372 bp, Glycine max
  modified_base (330)..(330): a, c, g, t, unknown, or other
ggacctaatgccaatcctttagatctctttccccacggccttccaaatgttgggtctggtgctgctggtgctggctctttagactttcttcgcaacagtcaacagttccaagccttacgcgctatggtacaggctaatccacaaatattgcagcctatgctacaagagcttggcaaacaaaatcctcatcttatgcgattgattcaagagcatcaagttgacttccttcgcctaattaatgaacccgttgaagggggtgagggaaatatactgggacagctagctagtgccatgccgcaagcagtgacagtcacccctgaggaacggcangcaattgaacgtctcgaagcaatgggatttgatcgtgcaact

SEQ ID NO: 30444 - DNA, 125 bp, Glycine max
gaagcaagctcggaagctaaaatagccaatgaagcaagcacagctcttcttgttgggtcttctgaacaggaaactgctccttgtcctgaaactgaaatacatttttctgatacatcaggacaact

SEQ ID NO: 30445 - DNA, 370 bp, Glycine max
ggaagcagtggaacaaagcaaggaagagaaagaaatttgtttctctctaaagagtctccgctgaactttttggtttcttgaagatgtcgttactctccgatcttatcaaccttaacctctccgacatcaccgataaggtgatcgccgagtacatatgggttggtggatctggcatggatatgaggagcaaagcaaggactctctcgggactggttaatgacccttccaagcttcccaagtggaactatgatggttccagcactggtcaagctcctggacaagatagtgaagtgatcttatatccacaagcaatttttcgggatccattcaggaggggtaacaatatcctggttatgtgtgatgcttacac

SEQ ID NO: 30446 - DNA, 409 bp, Glycine max
ggaggaccgaggaacacacaaagacaagacaaaggttcgcttttccatccctcccaatcacaaacccagaaccagaagaagggccttcaccttgaacatggcacacaccccagttacccttttagctgttgagcaacacaaagtgataatacccaacaagcacggtgaaaaactagtgggtatattacatgaatctggaagcagggagattgtaatcttgtgccacggttttcgctcctcaaaagaatccaattccttagtgaatcttgctgctgctttggaaaatgccagaatgagttctttccgctttgactttgctggaaatggggaaagtgatggctcatttcagtatggttactattggagggaggcagaagatttgcgtgctgtaattcaacattttcatgaa

SEQ ID NO: 30447 - DNA, 358 bp, Glycine max
  modified_base (19)..(20): a, c, g, t, unknown, or other
  modified_base (26)..(26): a, c, g, t, unknown, or other
ttcttagggagttaagaannaaaaantgggttgccaggagggttggatgagagcaaggttactagatagtggcgcaccaccatattacaaggtttccacctttgaatcagtgtataagccaagcttttgtttccatattggttctaaggaattggccgcttatgctcttgttttcaccgctctcattatgttcgccaatggtgttctgttatgaatggcaagtgccttgtcaacactttgtggacaagcatatggggcaaaagaatatggcatgatgggagagtatcttcaaagatcatggatagttgtgttcttaactgcaaaactgcttcttcctgtgttcatcttcacaagcccc

SEQ ID NO: 30448 - DNA, 433 bp, Glycine max
ggggttagggtggttgttgcatatggtggagcaccaataaaccagcagctgcgggatcttgaaagaggggtggacattcttgttgcaactcctggaagactggtagatttgctggagagagctagagtttcactgcagatgattcgatatctggccttagatgaggcagatcggatgctggatatgggttttgagccgcaaataaggaagattgtagagcaaatggacatgcctccaccaggtgccagacagactatgttgttcagtgcaacatttccaaaagagatacagagattggcttctgatttcctttcaaattatattttccttgctgttggaagagtgggttcaagtaccgatttaattgtccaaagagttgagtatgttcaagagtctgacaagagaagtcacctaatggaccttcttcatgcac

SEQ ID NO: 30449 - DNA, 439 bp, Glycine max
gagagcgagagagagagagaaacaaagcagcacccatttggatcctctcttctcttctttgatctccgttaccctttttgttttctcaacagagagagagagagagaatctttcgaagttcgtttgcgtgtgttgtgtggtcagtcaccgatggcagcaccacctgcgagggcacgtgccgattacgattacctcatcaagcttcttcttattggcgatagcggtgtgggaaagagttgtctgcttttgcgattttctgatggttccttcacaaccagttttatcaccaccattggcattgattttaagataagaaccattgaacttgatggcaaacgcattaagttacaaatctgggatacagctggtcaggagcgatttcgaactattaccacagcttattaccgtggagccatgggtatcttgctcgttatgatgt

SEQ ID NO: 30450 - DNA, 231 bp, Glycine max
  modified_base (189)..(189): a, c, g, t, unknown, or other
ggacagaaaggtggcagtggaaaaacaaaaaagcaaggatgggttgaggaatactaaattttctccattactgcaaaaattatctaataaggctcttcaaaagccatttaaaaaagcagcgtcttacaaatgcttctattgcttctgaaaatggtgatgcatctaatgatagcgacaaggaaacaaagnttgacggcatattattctgctgcaatgggctttttagtgata

SEQ ID NO: 30451 - DNA, 285 bp, Glycine max
  modified_base (24)..(24): a, c, g, t, unknown, or other
ggtgacaaatggagggtccttagntctggttctctttcttctctctgggctttcaaccaaggtctcaaatcactcttcttcttcacccttctgatctgctaattctcaaaggattcaaaattgggtggttttcgattgaactgggatgtccaagccactgctaggcataacggaagaagaaggtcaaagcaatgtcactttgttggcttctttctcaaccaccatggaaagtgtgtgccttgatagcttaaaacttgaagagcgcaactacatggggttatctga

SEQ ID NO: 30452 - DNA, 394 bp, Glycine max
  modified_base (290)..(290): a, c, g, t, unknown, or other
  modified_base (304)..(304): a, c, g, t, unknown, or other
  modified_base (331)..(331): a, c, g, t, unknown, or other
ggcttatagagagggcaaaacatattattttcattttcatctttttttgagtgtcaacaaatggcaaccactgtgatgaccactctcccccaattcagtggtcttaaaccccaattctcaacttgccctgtgaagaacttggttgctgtgcaacccatgagtcgcaaggggaaaggtgcattgggagctcgatgtgactacattggttcatccactaatctgattatggtggctgctacaaccctgatgctgtttgctggaaggtttggattggctccatcagcatacangaaagccactgcanggctaaagcttgaggtgagggactcangcttgcaaactggtgaccctgctggcttgacccttgctgacaccttggactgtggatctgttg

SEQ ID NO: 30453 - DNA, 435 bp, Glycine max
gagtggaaagacagtatggaaaaaccctgatgggtatttacctggtaggatggccccattaaagaagttctatgtatttatgacactggcttatgtttgccttagcatcatttggttttttcagtatgtgagattttgggatgatgtactgcaacttcagcactgtatcacagctgtcattgctcttggattgtttgagatgattctctggtattttgagtatgtcaatttcaacaatactggaatgagacctattgtgctcacaatatgggtcgtcactgttggggctataagaaaatcaatatcacgacttctcattctctctgtctcaatgggttatggtgttgtgcgacccactctgggtggtcttacatcaaaggttcttttacttggaataacttactttctagcatcggaggtactgaatattactga

SEQ ID NO: 30454 - DNA, 424 bp, Glycine max
ggtcaaaataatgaggtctttgatcctaaagctcatttgcctgtgaagacaaccttgaaggtgactatatatatgggggaaggatggtttcatgatttcaagcatacacactttgataaattctcacccccggacttctatgcaagagtgggaattgctggagtccctaatgatactgttatgaaaaaaactgagaaagtagaggataattggtcaccttcgtggaatcaagtatttgagttcccacttgctgttccagaactggctctgcttcgcgtagaagttcatgagtatgacatgtctgagaaggatgactttggtggccaaacgtgcttacctgtgtgggaactaagaagtggaattcgagcagttccactgtattcccgcaatggagataagtatgccaatgtgaagcttctcatgc

SEQ ID NO: 30455 - DNA, 283 bp, Glycine max
cgtgaagacgaccgacggaggggcacgagtgaagagcgaagaaaatggctcccacgggtgtaatctttttggctgtgttatgcttctcagcactgtcactgagtcactgtcttgccgaggataatggacttgttatgaacttttacaaagaatcatgccctcatgctcgagacatcctcaaagaacaagtcatgcttttctacaagcgccacaagaacactgatatctgctggctcagaaacatattacatgactgtgctgctcaaacttgtgatgcttcact

SEQ ID NO: 30456 - DNA, 434 bp, Glycine max
gacaaacaaatggcgagcactctgctgtccgtacaccactttctcccctctcaaaggagggaaaagatcggttgcttgagtggtgtcagaacttcattttgtggtcaagttgtgtgcaattcaagtttctgtgggagacaaataactagaagccatggaaaccgtcttgttgttcactcactgcttggaaggaaggtgaagtctgtgaagagcagagagactgtaattcctgaaccagattacaggattccaattgtgctactcggtatagctggtggattggtttacacagataatttggtacctgcagtacctgttggtctccttggattgcttctgttgtttcagaccactagagtgagatttgtctttgatgatgaggctctggaggtaaagataggtgaacagctccaggaatcatgtgagaatgtttt

SEQ ID NO: 30457 - DNA, 132 bp, Glycine max
  modified_base (1)..(1): a, c, g, t, unknown, or other
naaaaaacactttttaaaaaaatttttaacaaacaaactacacggaaaaaaactgctctatttcaaaaccatccctctcttaaaaacataaatattcattattctacccctaactaaaataattcataattt

SEQ ID NO: 30458 - DNA, 406 bp, Glycine max
gatcaacaatggcgagaaaaatctgatacccatgtgctacacagcccacccgctatttataccccacaaactctacccaaccctctctgctgttgcgttgcgtctttcattttcacactcaaccctttcttcatccttttatctcgtctctgccaaaacgatgccgtttgctctggagaataacggaggagttacgatcggacggtcctccttcgcttactgcgtcgcgatctgcgatcgtgattttccggaggatgattccgactccagctccgactcctccatcggaaggaacagcatctcgtcggaagattcctccgaccgggaagacgccgtcgaagttgaggttcagagttccttcaaaagccctttggataccatcaatgatctagaggaagatttaccc

SEQ ID NO: 30459 - DNA, 441 bp, Glycine max
gatcctgaaaaggttctgcgtcgtggtacacagattacactctatttaagagaggatgacaagtatgaattctcagagccaagcaggattcagggtttggtgaagaattactcacagtttgtttccttccccatctacacatggcaagaaaagtcaagaactgtggaggtggaagaggaggaagaacccaaagaaggggaggaaccaaaagaagagggtgagaaaaagaaggtgaaaaagactaaaactgagaagtattgggactgggaattggccaatgaaacgaagccaatatggatgcgcaatccaaaggaagttgaaaaggaggagtacaatgaattttataagaagacttttagtgaattcttagaaccacttgcacatactcacttcactaccgagggtgaggttgagttcagaagtattctgtacgttccggga

SEQ ID NO: 30460 - DNA, 152 bp, Glycine max
gtatttttaagctgttttaacatatacaaattcggggaatttgggggacttcttgaagcaaatatgtctttcattgctacaattgaagcggatactacaaaactatattgacaagacatctctcattggtaattgatcactcattatgattg

SEQ ID NO: 30461 - DNA, 397 bp, Glycine max
  modified_base (1)..(1): a, c, g, t, unknown, or other
ngatatatctaagcagcagtaccattgcagtggttgtggaatttgcagaactggaggaagcgaaaatttcttccattgctacaagtgtggttgttgctactcaactcttctgaaaaacagtcacccttgtgtagaaggagcaatgcatcatgattgcccggtttgttttgagtatttgtttgaatcaagaaatgatgtcactgttatgccttgtggacatacaatccataagagctgcctgaatgaaatgagagaacatttccagtattcgtgccctctctgcttgaaatcagtctgtgacatgtcaaaggtttgggagaaatttgatatagagattgctgctacaccaatgcctgagcaatatcaaaataaaatggtttggatcctgtgcaacgat

SEQ ID NO: 30462 - DNA, 401 bp, Glycine max
gaaggagagagggttcaagaaaagccccgaacagtgtaaatgcgggtggaagaatctcgttaatcgctacaagggaaaagagacatctgacccagagcatggcaagcaatgtccattttttgaagaattgcatgcggtctttacccaaagggcacataatatgcaacgattacttcttgaatctgaaactcgttcagctcataccaagaaaggggtgaaaagatcaagtggagatcggtcatcagaggaactctcagaagatgacaatgaggttgaatatgatagtgaagaggaaaaaccttccagaagtaatacccgcaaaaagaaagttgacaaagttggagtggagaagtcttcaagggcaagcaatccatcaaattctgccagtaatagtactagta

SEQ ID NO: 30463 - DNA, 115 bp, Glycine max
gctgaatgaggaggatagacaaaggctcttaccgtgccaatccgttgggatgtggaatgctaatcggtgctgactataaacgacagattatccgcggtgagtgttacagtgataa

SEQ ID NO: 30464 - DNA, 181 bp, Glycine max
agaagaagaagaagaagagttatcattggccaagagggtgtggaatgagagcaaggttatgtggatagtggcggcaccagccatattcacaaggttttccacctttggaatcagtgttataagccaagcttttgttggccatattggttctaaagaattggccgcttatgctctcgttttc

SEQ ID NO: 30465 - DNA, 422 bp, Glycine max
gggattgggaagtacatagcgtcggatatattctcggtgggagggtacgattgggcgatctatttttaccccgatgggaagagcgttgaggacaatgcaacgtacgtttcgctcttcatcgcgctcgctagcgaagggaccgatgttagggcgctttttgagttgacgcttttggatcagagtgggaaggagaggcacaaggtgcatagccattttgagaggaccctcgagagtggaccctacacgttaaaataccgtggtagcatgtggggttacaagcggttttttaagagaacagcactagagacatcagattaccttaaagatgattgccttagtgttaattgtagtgttggtgttgtgaagtcacacacaggaaggccctaaaatatataaaatcccaattccgccttccaacatgg

SEQ ID NO: 30466 - DNA, 334 bp, Glycine max
ggagggtcagagtgagaaagagagagagagagagagaaactgagagaaattcgcaaaccctaatttcggaaagatcggcgatggctgcctccaaggatcgcgagaacttcgtctacatcgccaagctcgccgaacaggccgagcgatacgaagagatggtggaatcaatgaagaacgttgcgaatctcgacgttgaactgactgtggaggagcggaatttactttctgttgggtacaagaatgtgattggtgctcggagagcatcgtggaagatcctgtcttccattgagcaaaaggaagaaacaaaagggaacgagttgaatgcgaagcggat

SEQ ID NO: 30467 - DNA, 143 bp, Glycine max
gctgctagaggaggatagacacttgttcttactgtgccataccgttatgatgtggaatgcttatctttgtcgactatagacacactgaatatccgctgctgcggtgataacgatagacgctccagctcctgcacatccgctaa

SEQ ID NO: 30468 - DNA, 230 bp, Glycine max
tgatgccaaacgccgaaaaaaagacgattttcgagatcgaaaacgtgaggaaattaaggtggaagagaaggagcgggaaagagagaaagcaaacattctgaaagaagagttggatttaaatgccgcatccaagagacgtaaacccaagaaggagcatttaccaactggtgaacctggtgagtactcgcctgtggcccatccaccttcttccgctggtattggcatgtcac

SEQ ID NO: 30469 - DNA, 406 bp, Glycine max
ggcacaagtgagtttgttgatcgagataactagaaacagtgtgatgaaaatgaaagtccttgttttcttcgttgctacaattttggtagcatggcaatgccatgcgtacgatatgttccctctccgaatgaacactggctatggtgcccgtactccggaagtgaaatgcgcaagttggaagcttgctgtggaagcacacaacatctttggctttgagaccattcctgaagagtgcgttgaagcaacaaaagaatacatccatggcgaacaatatagatcagactccaaaacagttaaccaacaagcttacttttatgccagagacctcgaagtccattccaaggacacatttgtgttcaatataaatggcaccggactctctaatattccatactacaaaaaacat

SEQ ID NO: 30470 - DNA, 133 bp, Glycine max
ggctcaaataaattagctgagcgagagaactcgaagcagtgtgacgaaaatgaaggaccttgatttttatcctgctacaatattcgtagcatggcaaagccatgcgtacgatatgttaactcttacaatgaac

SEQ ID NO: 30471 - DNA, 58 bp, Glycine max
gcctcagagaggggcctcaaacacgttaataaatgggctgctggggctactttaaaaa

SEQ ID NO: 30472 - DNA, 422 bp, Glycine max
gcgtgagcgtgaattccggtgtgacattgcactctcttacactgcgccacctcgttctctccgtctaaatagctgtcacttactcattcttcttcttcgtgcgtgcgtgtttctgtaaaatcgaatctcaagtctctgaatctgaatctcaacacaaccttcgttgttctcaacactgtgttcgtttttgctgccaaggttacaacactgaaagagacaccggagtaacataaataagatggaccaacaaaaccaaaataacactccagatggttcaggagaggtgcctttgaagcgcaaacgtggtcgtccacggaaatacccaaagccagattcagaggagagttcctatatcctagttagtcaaaataaaaggcagaatcctgttcgtgcggaacaagctccagtacctcctggatttg

SEQ ID NO: 30473 - DNA, 365 bp, Glycine max
ggagtgagtagcgagaatggagtttcaagggttaccggaaggttgcattgctagtatactctctcgcactacgccggcggacgtgtgtaggttttccgtcgtatcaaagattttccgttcggccgctgaatcggacgctgtgtggaaacgttttctcccttccgattaccattccatcatttcccagtctccttcgcctctcaactatccttccaagaaggagctctatctcgctctctcggatcgccctatcatcatcgatcagggtaaaaagagctttcaattggagaaaaagagtgggaagaagtgttacatgcttgctgctagagctctcaacattatttggggtgacactgagcaatact

SEQ ID NO: 30474 - DNA, 339 bp, Glycine max
gtatgaacagagctgaaaaagaagctaggatgaaaggcatgcaggatagccttgagaggagtagagctgaaatgaaagtcaagttttcggggtctgcaaacagacaagattcagcatcaagtgctcaccgtgccgagaaacttagatatttcaaatcaaatattaagagagagcagcatccaatagattctcttcagaatgaagatgatgaagatctatctgagttctcagaagagaagacttatggtgcttcaaggcaaagtaagaaaatttttcccaacagacatataccttcaagcacacctcgtacaacagctgtgtcggtctctcgttcatctg

SEQ ID NO: 30475 - DNA, 186 bp, Glycine max
ggagcgggtgcgttcattaacatagacagattgtctgtgcagtgttgtgtgcttgcgtcaattgtgtagccgtatcatgaactttaaatgacgcacgaaggatgatgcattgtgctatggactcatatgggcttgtggcacaacactgaacctgcaaggggccaccatgtgttatgcgtgggggac

SEQ ID NO: 30476 - DNA, 416 bp, Glycine max
gaagtggaagaagagaaagtggcatcgcttaggtacagatacagatacagacacaacctggaaaaaattccgaccccagcccttcactcttctctctgcagcggaggagttgttataaagctattcatccctgctcaatattctacaccccaagacagagaaggacaatagagatcaactaactatcccaacttgccaatataaactgtgaagagtttctataaatgcaggacttctagcatactgttgtttgattaaccaagttcttccatattggttgaagaagcctcgagtcaatatttagtttttgctaccatctgtgggtttctgatggatgatgctgggcatcgtgagaatggaagacacaaagcaggagatcaatataaatctgctcagggtcagtggttgatgcaaca

SEQ ID NO: 30477 - DNA, 415 bp, Glycine max
gtcattagaattaatgcttactgactttattgtggccattgattctggcgttcctcgtcgaccccctgctggaaaacgtgcagatgaccaggttaattatcctaagttggtcgagttactactcaatagctcagagttttcctctaacctgttacatgatataaccggagggagactaggattccctcatccagaagacacaaatacaatcattgatgttcatactactgatgtaacatcagtagttcatgcgttccgtagtggttttcgtgctgctcttaaggatctgcaaggattccacatattcctactcacactgcatcaaaaacttgataatttgttaagatcatttatgaatactataggcaaaatatcatcaagggagtctgaaaaagaggatgcagtggttcctgac

SEQ ID NO: 30478 - DNA, 249 bp, Glycine max
aggcgtccgaacacgtcagaaagggctacagaagggggcaacaaacaagttagtgaatgagctgctgggtctgattcacacagctccttgtccattcatctccacctactaatgctactcctacactatcattgtcttgagccctcttgtctcttaaatcctatacacagcgtgtggagtcatacaagactaatcctatttttttgcctctgagagtctgtcgaactgacccatgctgggagaccaaaa

SEQ ID NO: 30479 - DNA, 342 bp, Glycine max
  modified_base (71)..(71): a, c, g, t, unknown, or other
tttataagggggttgtacataaaaaataccgggtgggatacaggcgggaataataagcttgcagagcaaancaatatttggatgttttatggcataaataggtgcacggcaggcatgggtttcagcttttgtgactcaatcacccaccataaccattattatcagtacataatactagttaatctcagtcatgcctattcctaggattatactcttttcattccaacatctctccactgctgcggccctcgctcttcttctaacgtgcgtttcctttactacaactcaatctgttaggtattcaaaaacaacaagtcacggtaaaacaaaacattatcttca

SEQ ID NO: 30480 - DNA, 344 bp, Glycine max
gggtgctgtgagtgagattacccatagatagagagcgcggcataacctaaacttacccttcttctctctgtgtgtgtgcgcatcaaacgcaaccagaagcagccatggccactgcaagaactgtgaaggacgtttctcctcatgagttcgtcaaagcttactcttctcacctcaagcgatctggcaagatggagctgccagagtggactgatattgtgaaaactgcaagatttaaggagttggctccttatgatcctgactggtactatgtcagagctgcttccatggcaagaaagatctacttgagaggaggacttggtgttggtgcctttcagaggatttat

SEQ ID NO: 30481 - DNA, 446 bp, Glycine max
gacagcagcagagcaaaagaaagaaagaaagaaagtgcaacttcctctgttttgctcccctgtttaagccttatcataagcttagaatggcacacaaggaattttccattgccctagtgactctcattgttctctttgtcaacacgaacctccaaggtgccacggctgactatggtggtggttggcagagtgctcatgccactttctatggtgggggtgatgcttctggcacaatgggtggagcatgtgggtatggaaatttgtatagccagggatatggaactgacactgtggctctaagcactgctttgttcaacaatggcttaagctgtggatcttgctatgaaatgagatgtgatgatgacccaagatggtgcaaacctggctctattaccgtcactgctactaacttcttgccaccaaacccatctttgctaacaacaatg

SEQ ID NO: 30482 - DNA, 225 bp, Glycine max
gggggaaacaagggacccctatgctatgctatatggagttctgaaacggtctaacgacacgcctactcattgcactcttcgatcgcaactctctttttcttccaaaaaggaaaacgaatctcaaacttcacaagtgtttgacgcgccatggcggatcggttgacgcgtattgccatcgtcagcaacgacaggtgcaagcccaaaaagtgccgccaggagtgcaag

SEQ ID NO: 30483 - DNA, 415 bp, Glycine max
  modified_base (385)..(385): a, c, g, t, unknown, or other
ggagcaagagtgaagagcgaagagaatggctcccaagggtttaatctttttggctgtgttatgcttctcagcactgtcactgagtcgttgtcttgcggaagataatggacttgttatgaacttctacaaggaatcatgccctcaggctgaagacatcatcaaagaacaagtcaagcttctctacaagcgccacaagaacactgctttctcctggctcagaaacatcttccatgactgtgctgttcagagttgtgatgcttcactgttgctggactccacaagaaggagcttgtctgagaaggaaacagatagaagctttgggttgagaaatttcaggtacattgagaccatcaaagaagctttggaaagggaatgcccaggagtntgttcctgtgctgatatcctcgttctctct

SEQ ID NO: 30484 - DNA, 397 bp, Glycine max
  modified_base (357)..(357): a, c, g, t, unknown, or other
ggaagcaggtgggtgttatttccgtggtctaaagcaaagtgaattagacttagattctgattctgggattggatggagctaggcctcatggataagaatccaacgaagctggaacactttgatgacatgtggaggctcgaatccactgccacactattatctcacttgaagggggatgatggtcgacatgtcttgacattggatcgtacaatattctatccgcaaggtggtggtcaacctgcggatactggctttgtactcattcatggctttgataacaacaaatttctggtttctgatgttcggtccaaagatggaattgtttttcactatggtttctttgagaacctgggcggngaatttgggcctacactcgagaaagggaaggaggtttcac

SEQ ID NO: 30485 - DNA, 198 bp, Glycine max
cggttgtagtgtgacatcgtatggtggatgaactcggacatcatgttttgttgatacatggttgcatatcgattttactattacctaacaatacattgctgccaaacatactgagtgctccaaagctcctgcacctgctatatccggctgatatgcttgcatatgtaccgagacttgagctacactagttcatccaca

SEQ ID NO: 30486 - DNA, 423 bp, Glycine max
  modified_base (238)..(238): a, c, g, t, unknown, or other
ggagtgtagaaaagaaagtccatggccatgagtgtgggcgtggcattgccatccaccaccaccagtctcagtttccttcgctaccgctctcgctctccaattcaaaataaaatccgttttccccgtcaaattgtttctaaattaaacagtgcagaggtccaggttcaaacctggtaattttgctttctgaatcacgtaattttatttttatttttctgttttttgaaacagtcttcangccttgtattgtagcgtgtgggattggaggggttactctattcgctatcaacattctggaaatattggccctgcactagttttagtccacggttttggagctaacagtgaccactggaggaataatatttcagttcttgcacaatcccaccgggtgtactccatcgatcttgatggatatggata

SEQ ID NO: 30487 - DNA, 358 bp, Glycine max
ggttgtggtggtgttctgagggacgcatcagcaaagtggctccgtggctttgctaaaaaactgaaccctacttatgcagtgcaccagacagagttagaagccattctcacgggcttgaaggtggcttcagagatgaatgttaagaaactaattgtggagtcagacagtgactctgtggtgagcatggtggagaatggggttaagcccaatcaccctgactatggtgtcgtggaacttataaggacgaagcggcgtcgttttgactgggaagtgaggtttgtttctgtctccaacaaggcgaatcgtgtggctgataggctcgccaacgatgctcggaaattggcttgtgatgatgttt

SEQ ID NO: 30488 - DNA, 242 bp, Glycine max
caattgagtgatcagtcatggggaaagccgtattcgaatactaaacgcgactcacatcggtggatgatcgtctgatcctatccgaaccttcatctgaggtggatctgttaatcggaaagatcaactacactttgtgccggaccttactatttgatctcattcccacccaacacaacaactccggcgagccctcctgctgcctgaccgagcctgacaagaataagggccccaaatctaaatcc

SEQ ID NO: 30489 - DNA, 386 bp, Glycine max
  modified_base (1)..(1): a, c, g, t, unknown, or other
nagaggggaccacaaaacatgggttaacttctacccctgttcattgctcctctttcgttcttctctctttctctttcaacgcattccaaccctgtggcgctataccctcctagatctactctctaaccggctgggactaagagcagtggttagtcatacatggcactcttggcttcgcgagcaatgtcgaagggtgtggtggtatcagtgcctgttcttgttctatctgctttagaggccactgttttcctgttcttccttttgtactctctttcatcctgctcctgccctactccttcagaaatatctgcctccaatgctatgagtgttggtgttggcattggtgtttctgagtctagcagcagtaatgttcctgtagcaacaac

SEQ ID NO: 30490 - DNA, 370 bp, Glycine max
ggtcacaaaagatgtttcacttctatctagatggatggcgattgacctctatattcgggaagtggatagcctcagatttgagctatccatgaaccactgcagtgataggttgtcaagattggcacatgaaattctagaagctaagcatgagaatcgccgtgagaattggaatcagtctgcgaatagaagtctcacacttccaacacaacttccagctagagctcatttaccttctattgctgaaaatggtgaatctcggcatcccagactagacattccagcacctgattacatgcaatccaatcacaaggatggtggggtttctgtaagttcaactacatcaaaacttgccaatcccaatactcgatta

SEQ ID NO: 30491 - DNA, 342 bp, Glycine max
ggtagcacataggaattgccgaattggatacaatccggaagaataagcttggagagcaaggcaatatttggatgttttatggcagaaataggtgcacggcaggcatgggtttcagcttttgtgactcaatcacccaccataaccattattatcagtacatagtactagttaatctcagtcatgcctattcctaggtttatgctcttttcatcccagcatcgctccactgctgcggccctcgctcttcttcgaaggtgcgttccctctacgacaactcaatctgttaggtattcaaaatcaacaagtcacggtaaaacaaaacattatcttcatcctgtattc

SEQ ID NO: 30492 - DNA, 216 bp, Glycine max
gggtcactgtggtttctgtcatgggtggtagaaaatctgaatcctcaaaaatctaaacctctctttctggggttttggtcatcacaaacccttttgctggggcataattgtgaaaagggaaaaatggaaaaagatgatgaagatgaaaaatattagtagtagcaacaataataataagacaaatggtctttcttccatcatgaatggaagaagctc

SEQ ID NO: 30493 - DNA, 433 bp, Glycine max
gggaccacgaggttgaggattcttgttttcgatgaggctgatcaaatgcttgctgaggatggatttagagatgattccctgaggataatgaaagatatagaaaaagagaattctaagtgtcaggttcttttgttttctgctacatttaatgacaccgtcaagaatttcgtttcaaggacagtcaggatggatcataataaactctttgtaaagaaagaagaactatctttagatgcagtgaagcaatataaagtgtattgtcctgatgaacttgctaagattgatgtggtaaaagattacatatttgaaataggagagaatgtggggcaaacaattatatttgtgcgctcaaaaattactgcaagattaacacatgaagcacttgttaagttgggctatgaggttacatctatacaaggttctcttagtaatg

SEQ ID NO: 30494 - DNA, 305 bp, Glycine max
ggaaaaaagaaatgggatttttttttctttcaacgccaccccaagttcccagctttgaagtttgagctcaaggtccaaacattccaaaaacttgcatagagagatagatacatactacaaagacttcagatttttggggggagagaaaagatctgcgggggtgtaagtttgtggggattttttttttgagaaaagaggaagccgtttgtgtctgtgtgtgtttgtgaaatagtgtgttaatatgagtaactggttggggttctctctcactccacacttgaggattgatgaagaatttgagagag

SEQ ID NO: 30495 - DNA, 373 bp, Glycine max
gatgacagaaaagtaaacagcatcgacttgaatttgagtgatgaatttgttgttgaagcttcactttggaaattttgaatgttacgagacacaagtttctccaacttgctgggtcccacacagtttcttcctctgtctatttccctcgcagatctcaaccaattcttatatataaacccctttcgagatctgcttcaagctctgtccccttcttccacttccaccctcctctcaggtttttgtggataagagtgagctataatggctgccaagagaccgggtttaattgctttgtttgatgttgacgggactcttacagctcccaggaaagtggtcacaccggaaatgttgacattcatgcaagaactacgaa

SEQ ID NO: 30496 - DNA, 397 bp, Glycine max
ggagaaagagagagagagagagagaaactgagagaaattcgcaaaccctaatttcggaaagatcggcgatggctgcctccaaggatcgcgagaacttcgtctacatcgccaagctcgccgaacaggccgagcgatacgaagagatggtggaatcaatgaagaacgttgcgaatctcgacgttgaactgactgtggaggagcggaatttactttctgttgggtacaagaatgtgattggtgctcggagagcatcgtggaggatcctgtcttccattgagcaaaaggaagaaacaaaagggaacgagttgaatgcgaagcggattaaggagtacaagcagaaagttgaattggagctttcaaacatctgtaatgatgttatgacagtgattgatgagca

SEQ ID NO: 30497 - DNA, 312 bp, Glycine max
ggagaggaaggatgtgatgactaagaacgtctccatttacaagtcccaggcttctgcccttgaaaagcatgctgctgccaactgcaaggttcttgttgttgctaacccagcaaacaccaatgcattgatcttgaaagaatttgctccatctattcccgagaaaaacatttcttgtttgactagattggaccacaatagggcactgggccaaatttctgagagactgaacattcaggtttctgatgtaaagaatgtcattatctggggcaatcactcatcaacccaatatccctgatgttaaccatgcaactg

SEQ ID NO: 30498 - DNA, 287 bp, Glycine max
  modified_base (259)..(259): a, c, g, t, unknown, or other
ggcacaagtgagtttgttgatcgagatagctagaaacagtgtgatgaatatgaaggtccttgttttcttcgttgctacaattttggtagcatggcaatgccatgcgtacgatatgtgccctctccgaatgaacactggctatggtgcccgtactccggaggtgaaatgcgcaagttggaggcttgctgtggaagcacacaacatctttggctttgagaccattccttaagagtgcgttgaagcaacataggaatacttncatggcgcacaatatagatcagactcca

SEQ ID NO: 30499 - DNA, 376 bp, Glycine max
  modified_base (278)..(278): a, c, g, t, unknown, or other
  modified_base (344)..(344): a, c, g, t, unknown, or other
ggaacagttttcagtcaccaaacattttttttccatgaactttgcatctttctatcatcacatccatggccacagttgtgaagctccacgttttcccagaaagtttgaaccaacacaaaacgaggttgctcaggagaggctttggctcatgtccttcacctggggtgcttggttttggccataaaaattatgatcagttctctgtgaaagtgtgcagggcttttaggactgaggatggtggggatgtgaaggagaaaaagtttcgaaatttgaagaanaatgaagagaaaaccaaaagggaaagtgggttttggaagttcctcaagtctatcttgctgaggaanttcatgggtgggtcaaaatcagatgatgagta

SEQ ID NO: 30500 - DNA, 331 bp, Glycine max
gagaatgagaatggattggatacttctattaatggggctgaggtgaagcatgtgatgaaggtgagcctggatgatgatagacatgattactattcaattgggacttatgatgagaagaatgttctgttcacaccagatgatgctaagaatgatgttggcgttggattgaggtatgactatgggatattctatgcatccaagacgttttatgatcagaataaggagaggagagttttgtggggttggattggggagtctgacagtgaatatgctgatgtggccaaaggttgggcttcagttcagagtattcctagaactgtggaacttgata

SEQ ID NO: 30501 - DNA, 380 bp, Glycine max
aaggaacaaaagcagtatgggatgacacccttaaagaaagctgtggatctagagagattgaaggaattggtctctattggatttgacaaggagcttgctgctgaagcccttagaagaaatgaaaatgacactcagaaagcattggatgatttgacgaatccagaaactaattctgctttgcaggtcaatatcgagtcaaggaaaaggaagagacagaaacaagcacgagattctgaaattagaaacgttgtgcaaatgggtttcgaaagatcaagagtggttgctgcttttgaggccggaggtagtttagaagaagtattgcaaagactaacagcacaacctgggactgaccccacacaacctcaagaaaattcagcttc

SEQ ID NO: 30502 - DNA, 396 bp, Glycine max
ggaggcggagacgaagaagtgaagagaagagaagagaagggatttggatctgaaaagagaggatggggggaggaatggaagcaaacaagaacaagttcatagaggattggggcactgccagagagaatctggagttcaatttccgttggactcgccgcaaccttgctcttgttggcatcttcggcatcgctattcccgtcctcgtctacaagggcatcgtccgtgaattccatatgcaagatgaagataatggtcggccgtacaggaagttcatgtgagagagtatggagagtcttttgtaataattcgtcaagttagaccttgatattatgaggctacaaaccatgtttttttttccttaattcgcaaaagcttgcttgcttttaagtactctag

SEQ ID NO: 30503 - DNA, 412 bp, Glycine max
gcaacaataattcttctgatccgtttcgttcaaatcaaaataaaaaatcgcctctttggaacgctgcctccttctgacaaaaaaacattgtaccatccgaaatgtcggccatggtggaacatacggatcaaagagctgaagctattccccaatccacagctgcaccaaattggactattcatgtgtcagacataaaaacagttaaggttagcaacatatcattggttactttcaagaaggacattgaagaattcttttcattctcaggtgatattcgatatattgagatgcaaagggaaagtggtcacactcaggttgcttatgttacattcaaagatacacaaggagcagacacggcagttctcttaacgggttccaagataagtgatctatatgtcaccattacacctgt

SEQ ID NO: 30504 - DNA, 299 bp, Glycine max
gactctgaaacagttaaccaacaagctttgttttatgctagtgaacgcgaagtccatcacaacgacatatttatattcggcatagataacaccgtactctctaatatcccatactatgaaaaacatggatatggggtggaggaatttaatgaaaccttatatgatgaatgggttaacaagggcgacgcaccggcattgccagagactcttaaaaattacaacaagctgttgtctcttggcttcaagattgtattcttgtcacgaagatatcttgacaaaatggccgtaacagaagcaaa

SEQ ID NO: 30505 - DNA, 346 bp, Glycine max
  modified_base (340)..(340): a, c, g, t, unknown, or other
ggagggagttttggtggatattgagaacatgttagctcgtggtaggatggacctaccagtgagtgtgtgctttgcggcagcaagaggagatgacttgttgttgcatcaattactcaaacgaggcatggatccaaatgaatccgacaacaatcgaaggacagctttgcatatagcggcatctcaaggaaaacagaactgtgttttgcttctgttagactatggtgcggatcccaacattagagatttggaaggtaatgtgccactatgggaggctatagtgggaggacatgaatcaatgagcaagctgttatcagagaatggagcaaatttgcaatgcggngatgtg

SEQ ID NO: 30506 - DNA, 379 bp, Glycine max
atggcgagaggattgaagaagcatttgaagaggcttaatgccccaaagcattggatgcttgacaaactgggtggtgcatttgctcctaagccctcatctggaccacacaaatccagggaatgcctgccactcatactcattttgcgaaaccggctgaagtatgctctgacataccgtgaagtcattgctattctgatgcagcgacatgtccttgttgatggcaaagtcaggacagacaagacatatcctgctggtttcatggatgttgtatcaatccctaagacaaatgagaactttcgcctgctgtatgacaccaaaggccgattccgtcttcactcagtcatagatgacgaggctaagttcaagctttgcaaagttc

SEQ ID NO: 30507 - DNA, 380 bp, Glycine max
gagagacgtcattaaaagaaaaatatttctctctctctctctccctctctgcattcattccttaccccaactctgtttgttcctccctcgccgccgcagaatagctcagtgaatcgcgtcgtattttggagttggttgaagggttggattggagatttgggaagaaggtacagaacgagaacgtgggtctgcaaatgcagttgttggaggtttattggttgtgtctaacaactcatatttaatttaggggtgtgtgtctttctctcctagagcctagtgaagtagaagagatgagcgtgaaaaatgatgttcctgggaaagaggtaaacgtgctgaagggtcacgagggtggtgtgttagccgcgaggttcaacacccga

SEQ ID NO: 30508 - DNA, 336 bp, Glycine max
gatcgtgaggtgttcaagaagattctcaaggacggagtcgatggacccattttagtctaccctctcttgcgaaacaagtgggatagtcgtcattcagtggtggtgccggacagtgacatgttctacatagtagccttgctccgattcactccaccacccccaaagggcccagcagctgaactcttggtggcgcaaaataatgagattattgagttctgcacaagcagaagccttgatttcaagctatactttcctcactaccagtcacgggaggattggatcaagcactttgggaatcaatgggccagatttgcggagcgaaaggccaattttgat

SEQ ID NO: 30509 - DNA, 427 bp, Glycine max
ggtatacatatatataatagcatttgttcgggacatgttaatgtactattgcaacaacaacaacattaacatcatctgaggttaatttgcaactacacttcctggtgtatttcaattaattcaaatggcgcaattacctccaaagatcccaaacatgtcaccaagttggccagatttctcttcacaccaacagaagatgcaattgccacctcttaataacaacggcaccatcaccaacaactatcatcagcacaatcagaacccttcttgggtggatgagtttctcgacttctcctcggcccggcgcggcgttcaccggcggtcggtgagcgattccatcacctacttggattcaccaatgaaatgtggaaggaattaaagcaacaacaacaatgggaaccagttttacaaggttgatgatgaacaa

SEQ ID NO: 30510 - DNA, 431 bp, Glycine max
ggttgtattactactaaggaacttgggactgtgatgcggtcactagggcaaaacccaactgaggcagaactgcaggatatgattaatgaggttgatgctgatggcaatggaaccatcgacttcccagagttcctcaacctgatggctcgcaagatgaaagacaccgactccgaggaggagcttaaggaggctttccgtgtgttcgacaaggatcagaatggtttcatctctgcagctgagctccgccatgtcatgacaaatcttggggagaagctgaccgatgaggaggttgatgagatgatccgcgaggccgacgtcgatggtgatggacagatcaactatgaggagttcgtcaaagtcatgatggccaagtgaggaccattcaaccataacctaaatttgaaaagcatataaagagaagagggacagtg

SEQ ID NO: 30511 - DNA, 394 bp, Glycine max
gatggttagcgggaggaggaagaagtgtgtgaaaaaatggcggcggcgaactctgagggtaatggtcagaaaccgagattggaaacgtttcagttattctcttcctccgcttccgccttcggaatcttcgacgatgctgcgcaacaagttcctcatatacctcctcctccctgcgttgaagtccttgcttctgaggttccttcatccatcaaacacaacgtggactctgtaaatttggatggagttactttgttaaaggtaggatctggtcatggactccctggaatctttgcattgcttgagggggcagctgctgtacattttcaagacttcaatgctgaagtcctacgtttcctcacaattcctaatttaaatgctaatctttctagagata

SEQ ID NO: 30512 - DNA, 346 bp, Glycine max
  modified_base (337)..(337): a, c, g, t, unknown, or other
ggaggagagagagagagagagagatggaggataagacggagaaggtgaagtctgaggcagttcagataattgaagcgtttgaagttctgccaaagctcgtggttttcgatctcgattacactctctggcctttctactgtgagtgtcgatcgaagcgcgagattccttctatgtatccccacgccaaaggcatattgttagctctcaaagagaaaggcatcgacattgccatcgcttctcgctcgccaacggcagacatcgcaaccgctttcctcaacaaattgaacctcacgccaatgttcgtctcacaggaaatatattccaatggacacatatnaccgatcat

SEQ ID NO: 30513 - DNA, 409 bp, Glycine max
  modified_base (399)..(399): a, c, g, t, unknown, or other
ggagcagaggcagagcataaacgttgttgtgtgtttccttagaaaagagagaaagaaataatgagctccatgggtgagagccagcagcggagcttgtttgggagtacaaaggcatcgtctctgccagtgtcaacgtcgcgttcagactctgaaggaggccttcgcagacgtctttcttctctgtctctgaagatccaattagagagcccgaattcctcctcatggtcatttcccagatccaagtccctctcatccatgggtgactatgcaaggacatggtgggactggagctgggcctggatcctctccaggaagctcatcttcgctacagatctcgaaatgaaccgaccagaaaccaagctccttgcttctcataacaggggcacttggagacatgtnttctataagc

SEQ ID NO: 30514 - DNA, 439 bp, Glycine max
  modified_base (363)..(363): a, c, g, t, unknown, or other
agacgacagaaggggatcttggatatgtagattccgtttcagttcaggaaattggtggtgtcagggtgaccattgtgaaaaatgaagagggtggaaattctgtagccactgttgttttacgaggaagtactgatagtatactagatgatcttgaaagagcagtggatgatggagtgaacacttacaaggcaatgtgcagggatagccgctttgtacctggagctgcagctactgaaattgagttagctaaaagggtgaaagacttttccttcaaggagacagggttggatcagtatgctattgcaaaatttgctgaaagttttgaaatgattcctagaactttggctgagaatgctggcctanatgcaatggagatcatatcttctctgtatgcagaacatgcatctggaaatgccaaagttggcattgatttggaaga

SEQ ID NO: 30515 - DNA, 429 bp, Glycine max
gagaatctgagagtagtgtgtggttgaaagttaagaagtagcaaagatgtttccattcgggcacaagggtcaaaagataaaggggactatggtggttatgcagaagaatgtgttggatatcaacagcatcaccagtgttgacgggatcgtcggcaccggcttagacttcttaggcagtgcactcgatacagttacttttttagcctcctccatctccatccaacttattagtgctaccaaggctgatggtgggaaaggaaaagttggaaaggctacaaatttgagaggaaagataacattaccaaccataggagctaaggaagaagcatacgatgctcaatttgattgggacagtgacttcggaattcccggtgcattttatattaagaacttcatgcaaaacgagttctacctcaagtctttaattct

SEQ ID NO: 30516 - DNA, 364 bp, Glycine max
  modified_base (246)..(246): a, c, g, t, unknown, or other
tggcgcaaaaggttagggagatatgcggttgagtcatacttggaacaaattttatcacatggtttcttccatgctgaccctcatcctggaaatattgcagttgatgatgtcaatggtggaagattgatcttctatgattttggaatgatggggagtatcagtccaaacattcgagaaggtttgcttgaaacattttatggagtttatgagaaagatccagacaaggttctacaagcaatgattcanatgggagttcttgtccctactggagatatgactgctgttagaagaacagcacaattcttccttacagttttgaagagcgccttgctgcacaaaggcaagagagagaggaggcaacaac

SEQ ID NO: 30517 - DNA, 262 bp, Glycine max
gaagaaagagaggtaaatgagactggtatgccggtttccatctggtttttgccgggggttttgccaaaattgggttcaactccaatagtcccgcggatttccccttgacctcagattaaattgaaaaaccggccattaaccagttggatggttaagggtcccataattcatttagtaagggaattttaatggaaccggccttgaattcctttattccccaatttgccaattcaacctgttttaccaccaccagatattccaa

SEQ ID NO: 30518 - DNA, 320 bp, Glycine max
tgcacaagaagatgagacattaaggaatgctgttgcagtttttaagggaaagagttggaagaaaatagctgagttttttcctgatagatcagaagttcagtgtctgcacagatggcaaaaagttcttaatccagaacttgttaaaggaccttggacacaggaggttgaaacttggtccttttctttttaatttttcctacagctttattcaagcaataacttcttttgattggcttacaggaggatgataaaattgttgaactggtgtcaaaatatgggcctacaaaatggtctttgatagccaagtctttacctggtcg

SEQ ID NO: 30519 - DNA, 313 bp, Glycine max
acctgaaagaagctaagatctattttccatcaagagtgcgttgaaatttgtttcacagacacaaattgccttgccccggaaggctatttaacatcaactattatgaacttctacattcaatatttgcagcaacaagcattgttgacaaatagatcgttatctgcctaccattttttcaatacatatttctacaagaagcttaaagaagctgtttcctacaagcaaagtgattgagagatctttgcaaagttcagaagatggtggaaaggtgtaaatatttttcagaaagcttatgttttgattccaatacacg

SEQ ID NO: 30520 - DNA, 415 bp, Glycine max
gaatgtgcaagagtttgttgtgagctataagctagtttatcgtgaggagaatatgaagttgtttgttttctttgttgctgcagtagttttggtagcatggccatgccatggcgcaggctaccaaaggttccctctccgaatgaaaactggctatggtgagcgttcttcggaggtaaaatgcgcaagttttaggcttgctgtggaagcacacaacatccgagccttttaaaaccattcctgaagagtgcgttgaaccaacaaaggactacattaatggcgaacaatttagatcagactctaaaacagttaaccaacaagctttcttttatgctagtgaacgcgaagtccatcacaacgacatatttatatgcggcatagattacaccgtactctctaatattccatactatgaaaa

SEQ ID NO: 30521 - DNA, 295 bp, Glycine max
ggagcaagagtgaagagcgaagagaatggctcccaagggtttaatctttttggctgtgttatgcttctcagcactgtcactgagtcgttgtcttgcggaggataatggacttgttatgaacttctacaaggaatcatgccctcaggctgaagacatcatcaaagaacaagtcaagcttctctacaagcgccacatgaacactgctttctcctggctcagaaacatcttccatgactgtgctagtcagagttgtgatgcttcactgttgctggactccacaagaaggagcttgtct

SEQ ID NO: 30522 - DNA, 391 bp, Glycine max
ggcaacaaagagagcaaggagagaggagatgtcggtggagcagaaagcagcagggaaggaggaggagggaaaactgcagaagggaattgcagagttctacgacgagtcgtctggcatatgggagaacatttggggcgatcacatgcaccacggcttttatgacccggattccaccgtttctgtttctgatcatcgcgctgctcagatccgaatgatccaagaatctcttcgttttgcctctctgctttctgagaacccttctaaatggcccaagagtatagttgatgttgggtgtggcatagggggcagctccagatacctggccaagaaatttggagcaacgagcgtaggcattactctgagtcctgttcaagctcaaagagcaaattct

SEQ ID NO: 30523 - DNA, 364 bp, Glycine max
ggagagaaagagtgaggagagaattacagagcattttccaacacgattacacgaccgaatcaaaccctctctttctctccgaagctgcgtttaatatcttactcgccttagattgttcttctctttcattatactgttctcttttcgatttgagggaacagtacaagagtgtgaggatcggttaacccaactgcacaggtagtcactaaaataatggagtctcacgatgagactggatgccaggctcctgaacgccccattctttgcattaataattggggcttctttggaagagcagctaccatgaacatgtgttccaagtgttacaaggacatgctgtttgaacaagagcaggacaattttg

SEQ ID NO: 30524 - DNA, 302 bp, Glycine max
ggtgaagaaagagactaccagttatcgagtgacaggtttatcttcttctgcttggtagcttcaattccatctacctgcttagtgttatttatattccacactgtcatcaatcagtaaacaaagttaaatctgatccttcattcccttcttccatggcagctctcactgttggccactgttgctgtagcaaaagggtaccttcatctcatcatgaattcactaacagaagcagatcacccaggatttttattctatcatcttgccatggtagaacaccagatcccaaagaaaagaaagatgat

SEQ ID NO: 30525 - DNA, 228 bp, Glycine max
tgggatgcatacagtactgaatcatcacctcgtggggagaactctcgtgcctcacttgaccttgttacagttcttgatgtgagtggttgcatggctggttctaagctagcgttgctaaaacgagctatgggttttgtcattcagaatcttggtccatcagacctgctgtcttgcattgccttctcctccactgcacgccggatctttcctcttcggcagatgactgac

SEQ ID NO: 30526 - DNA, 241 bp, Glycine max
gacacaaaagggtatctaaaggacacaacattggagattatggagctagaaccaaaggaaggaccggttcatgatcaatacgatgatcttgttggttctttttcttcttcttcttcttcaacatcatcttctgtttctggaatttcaagtgggtcatcattggaatctgattcttttgaagaagtaacatcctctgcctcctcttcttcatcatcagcagctgatgatcaacttgtagttg

SEQ ID NO: 30527 - DNA, 269 bp, Glycine max
ggccaccagaggggggagagcgagagagcggagcgtattgcagaccagagagcggcacgattacacgtccgattcaaagcctctatcacgctcctaatctgcgcataatatcttactcgccttacattgctaacgtctttcattatactgttgttgatcctatttgaggttacagtacaagtgtttgaggatcggacgacccaactgcacaagctgtcactcacacgctggattctgacgatgagactgagtaccatgactatgaacag

SEQ ID NO: 30528 - DNA, 387 bp, Glycine max
ggggacaaacaatgagaaattactaaatggtgagttttacattgggcttatacaaaagagggcaactgggcaggaatattctgaacttttgcacgagttcatgactgctgtcaagcaaaactacggagaaaaagttcttgttcagtttgaagattttgcaaaccacaatgcttttgagttgcttgcaaaatatggcacaactcatcttgttttcaacgatgatattcaggggactgcatctgttgatcttgctggggttgtggcagccttgaagctcattggaggtactctggctgaccacacattcttgattcttgatgctggagaggcaggaactggaatagcagaactaatagctcttgagatgtcatagcagacaaagacacc

SEQ ID NO: 30529 - DNA, 226 bp, Glycine max
gtgagagacaacttttatctgatcctgctgttcaccagaacaaatgttggttttataggaagcgtatcattcatgcaatcaattgatgcacgttcatcacagtgtatcttgatactatttatctgtatctctctggtgctcatgatttatattgggatacgtaagataaaaacactgagaactgtaagaacatattgatttattgggtgggatacccacattatta

SEQ ID NO: 30530 - DNA, 426 bp, Glycine max
ggagtttaggaagtgtttggttacttctgagattctgctgttccttagagagcgagcgatgacggtagcagcaggaatgggttacgctctgctagcgttaggaccctctctctccatcttcgtttctgtcatttccaaaaaacccttcctcattctcaccgttctctccagcacactgctgtggcttataagtttgattgtgctgtctggaatatggaggggggttttgcctctcaacacaacagcttggtggccttttggaatactcattttctcatctgttgcttttcaagaagccctcaggcttttctcctggaaaatatataagaggttacaagatatgttagatgcctttgctgatagaatatcaaaaccacatcttcacctgacagataagatgctgattgctctggctggtgggttggg

SEQ ID NO: 30531 - DNA, 387 bp, Glycine max
  modified_base (275)..(275): a, c, g, t, unknown, or other
gttgaagctaaatggaggcttgggcacaactatgggttgcactggtcctaaatctgtaattgaagttcgtgatgggttgacatttctagatttaattgtgatccagattgagaatctcaattccaaatatggaagcaatgttcctttgcttttgatgaattcattcaacactcatgatgacactcaaaagattgttgaaaaataccaaaactccaatattgagattcatacttttaaccagagccagtatcctcgattggttgctgaagactttntgccattgccttcaaaaggcatactgacaaggatggatggtacccttctggccatggaaatgtctttccatcattattgaacagtggcaaacttgatgcactattgtcacaa

SEQ ID NO: 30532 - DNA, 276 bp, Glycine max
gacaaagagtgatagatagaatacagcatttcatttctcatcatcaatggctttctcttgtaaacttgacagcttcattctctctgcctataaaccccaaaactccattctcccactttcaatccaaccttcctccttccttccatctccttcttctttgaagcctcagaagcttcccttcagaattcgctatggttctaccatcagagccacgtcatcatcctcaaccccttccgcaaccattgccgaacctgaaggcattaagattaaatcgat

SEQ ID NO: 30533 - DNA, 414 bp, Glycine max
ggaaaaagggagtgcctgataacccataaccgaccgcaccaccgttttcctttgctttgcgttctacaatgtcgaaaacctcagagattattacatgcaaagctgctatttgctggggaataggaaaacctgtgactgtggaagagatacaagtagaccctcccaaagccaccgaagttcgagttaagatgctttgtgccagtatatgctccacagacatctctagcacaaaaggattcccacataccaattttcctatagcacttggacacgaaggagttggtattatagagagtgtcggtgatcaagtaacgaatctgaaagaaagggatgtggtaattccaacatacataggcgagtgccaagaatgtgagaattgtggttcagaaaaaacccatttgtgtatgacatacc

SEQ ID NO: 30534 - DNA, 283 bp, Glycine max
ggcacaagtgagtttgttgatcgagataactagaaacagtgtgatgaaaatgaaggtccttgttttcttcgttgctacaattttggtagcatggcaatgccatgcgtacgatatgttccctctccgaatgaacactggctatggtgcccgtactccggaggtgaaatgcgcaagttggaggcttgctgtggaagcacacaacatctttggctttgagaccattcctgaagagtgcgttgaagcaacaaaggaatacatccatggcgaacaatatagatcagac

SEQ ID NO: 30535 - DNA, 319 bp, Glycine max
ggcacaaaaatacaatacaaaacaaaacagagcaaagagagagtgtgtgaaaagtgaaacaaaaaacagaacaacaatggcgacacttaaggttcctcagcctcttccccccgttgcagatgattgtgagcagctccgaaaagccttctcaggttggggaactaacgaggagctgattgtatcgatcttggctcataggaatgctgctcagaggaagcttatcagagaaacttatgcccagacctatggagaagatctactcaaggccttggacaaagaactcacgagtgattttgaaaggctggttcatcttttgaca

SEQ ID NO: 30536 - DNA, 326 bp, Glycine max
gatagacatcagtgtatctgatgcattgagtaggaaattccagtgtgcaactttgcagcttgacttccagcttcctgatcgttttaagttggaattctcagctgaggatgaagccaaaattgagagacctgtaatgatacacagagccatcctaggatctgttgaacgcatgtttgccatacttttagagcactacaagggtaaatggcctttctggctcagtcctcgtcaagcgattgtatgccctgtgtctgaaaagtcacaatcttatgcactacaggtgcgagatcagatccaccaagcagggtatcacgttgatgctgata

SEQ ID NO: 30537 - DNA, 319 bp, Glycine max
gagacaaagatgagaagctctaataataaccatgatgctcctgcaccttcacctctacttcaagacctgaaggtgatcatccacaatgcctccatgattttcccatccaaagagatcgagagaaagtcccttttcttgtcaaacattgacaaggtcctcagcttcgatgtggaaacggttcacttctttggtgcccacaaagattttcctcctcgtgttgtgaatgagaggctaaagaatgccctagaggatgcccttgtggtttatgacttcttgggtggaagattgaagctcaactttgacaccaaaagattggaga

SEQ ID NO: 30538 - DNA, 259 bp, Glycine max
ggagtcgaacaagaaagaaaagaaaagaagaggaaaaggagagtggagaggaagaaaaggattgaagttgttgctgtgagaaagagaaagagtgaaatcggagtttgggaaggaattgcaatcaatggatgtgataaagacgcagcaaatctcatctcgaccaatcgagaaggtggtggttcaccctctcgtgcttctcagcatcgtcgacaactacaacagagtcgccaaagacactcgcaagcgcgttgtcggcgtc

SEQ ID NO: 30539 - DNA, 395 bp, Glycine max
gggtaggcgaaatggaggtttgggccttggaaggatttggtgttgctcatattttacaagagatgcttacttataaatctgatcatattaaaactcgccaagaagtactcgggactacgatcattggaggaacaatacctaaacctacagatgctccagaatcttttagattgctagttcgagaattacgatctttagctatggaactgaatcatttccttgtatccgagaagaacttccggattcataggaaggaagcttaattggactgaatcagaatttttattctatgattgatcagtataaacatcaacaactccgaattggatcagtttctcctcaacaaataagtgcttgggcaaaaaaaatcctacctaatggagagatagtggggg

SEQ ID NO: 30540 - DNA, 330 bp, Glycine max
gactcttcatttgtgttgtagtaacttgtgatgagcctgaaaagcagtgaaaggaaaattatgagaaggggtttcatgtgtcgctctcaggcttcaacagctgtgtgcatgagtactcgtgaccctcgatctgtagttgtgcctaagaagcttgaaagaagagtgtttcttgatgatacaaggttgatcaactatgccaagtactccaaacttgttgaacctccaaggtctaatccagttccaaagatcaagcttagagggcaagatcaggttcaagccaatgaaccaagggaacttctgaaaacacagacagataataatgtctttcaa

SEQ ID NO: 30541 - DNA, 378 bp, Glycine max
ggcagcgcttgatttgaggccaggcaagccccactcaaccaccacacctctcctcgttcacgctacccctttctgctcttcttctacctttcaagttttaaaagtataaagatggcagagacattcctatttacctcagagtcggtgaacgagggacaccctgacaagctctgcgaccaaatctccgatgctgtcctcgacgcttgcctcgagcaggacccagacagcaaagttgcctgcgaaacatgcaccaaaaccaacttggtcatggtcttcggagaaatcacgaccaaggccaacgttgactacgagaagatagtgcgtgacacctgcaggaacatcggcttcgtctcaaatgatgtgggactggatgccgac

SEQ ID NO: 30542 - DNA, 355 bp, Glycine max
  modified_base (295)..(295): a, c, g, t, unknown, or other
gacggattcaaagtgaagttagtgcaacttcacttttagttctctctctccctggtcctttgagcttcaagaagttgttcctgtttgttgtagcagttcctgtccttaatttcttcaaccttctcaacacataaccaccttggtctgtgtttgtttgtgtgtgcttattacttggtctcttcatattgtacatataaaaattatggatgatgaatatgccaatcttattagaaggatgaacccaccaagggttgtgattgacaacaatgcctgtgaaaacgccactgttattcangttgacagtgtcaacaaacatgggattctcctcgatgttgtccaagttatatcagatatg

SEQ ID NO: 30543 - DNA, 332 bp, Glycine max
gggtactcaaacaacactttggtgtagagcaagaactactataagtgtaggaggtgattggaagttgttcgaatccagaatccgaaaaaagggcaccaccgtgtcaacaagtagaagcagaagctgtttttgttcttcgccgctgacactaatcgtttcttcaatgccttacgagaaggaattcgccgctgcaaaaaaagcagccactctcgctgctcgtctctgcaagaaagtacagaaagctcttctgcaatccgatgtgcactcaaagtcagacaaaagtcctgtcacaatggctgattatggttcacaagcattggtcagctttatac

SEQ ID NO: 30544 - DNA, 387 bp, Glycine max
tgctgatggggggacggatgtgggcgtatacggtgattgcataaatgggagtctctgcagagctgaacacgcgctcaaacgatgatactgctaatactcatgatgagctattgcggtcgaccctgtcagcatatgaccatgttgttacctgatctgaagccggagaatgagtgttgccacttataacgacgacgaggacaacgctcaatggccattgaattgtgatgcagtctgactatgtaaagccacctgagacgttgagtgatattgcagggcgtggttaatacgtggcttgagaccttttgcatgtatcttatgggacacaggcaagaatagcagagcattgctgtaagtgcttatattaccagatgcggaaaacagcccttt

SEQ ID NO: 30545 - DNA, 348 bp, Glycine max
ggtgaaaggacatatttggggaggcagtcagaaggcagctctgatgcatatgagacagatgacaataataatcgtacaccttcacattctttgccaaaagattccaaacctttactaagatttaaattcaagaaacccagcattgaaagtcaaaattctcctcatcaggaggaagagaagatgacaatcaagggccagaggtcaaaaaggaagagaccttcaccttttaaggagaaagcatcttttaatgagtctgaaggtgtaagtcaatcacatcaagacagtgcaatggatgggataatggatgcaaactggatattgatgaaattgggcaatgatgcaattgga

SEQ ID NO: 30546 - DNA, 426 bp, Glycine max
gattcgggcacggttataacccggttcgtggaggccgtttacaacgcggtgagggaggagttcaggaagcaggtgggaggcactacattcacgagcattggagccttcgatacgtgttttgtgaaaacctacgaaactctggcgccgccaattacgctgcacttcgaggggttggacctgaaactgccgttggaaaacagcttgatccacagcagcgcgggttcgctggcgtgtcttgcaatggcggtggcacccgacaatgtgaactcggtgttgaacgtcatcgccaactttcagcaacagaaccttaggaatttgtttgataccgtccataataaggttggcataacccgtgaggtttgtaactagctggttggctacatttttatttatttatttattaatatgtaccagtggctttcttga

SEQ ID NO: 30547 - DNA, 438 bp, Glycine max
ggtgactaacataaaataattagagagagagagagagagagaggatatgggttcgaagaggtatgcgctattgatgtgcggtgaggattcggagtacttggtgaagatgcacggaggcacctatggggtattcatgaagttgctccaagagcaagaggaaaagtgggacctctacaagctcgtccaaggagagttcccggagcagcatgacttgcctctctacgatggctttgtcatcagtggaagctgctatgatgcacatgccaatgacccatggatccttgacctcattgctctcgttatcaaattggactccatgcacaagcagatccttggcatttgctttggccaccagataattgggcgtgcattgggaggaaaagtgggtcgctctcccaatggttgggacattggtgttaaagctataaacgtgtcatt

SEQ ID NO: 30548 - DNA, 237 bp, Glycine max
gggtcccagttgtggatgagtggaatcttctgcacagggccgagtatgataacctgaagcttgaaatgccgtggtatgtggcggaatacttctaccccttggccggaataaggctcataagggaggacttgaattacaagaacaaacccatcatccctgtgctcaaccctcaaggaagagtggtcaactacaatgccatgcacatgattttcgtctggggcatcgatgcattccctt

SEQ ID NO: 30549 - DNA, 323 bp, Glycine max
gttcccaacatgattagtggtgcatctcaagctgatattggggtgttggttatttctgctcggaagggagagtttgaaactggatacgagagaggtggacaaactcgtgaatatgtccagcttgcaaaaacgctgggtgtgtctaagcttcttgttgttgtcaataaaatggatgagcctacagtgcaatggtcaaaagaaaggtatgatgaaattgagtcaaagatggttccatttctaaagcaatctggatacaacgtaaaaaaagatgtcttgtttttaccaatttctggtctaatgggtgcaaacatgaaaacaagagt

SEQ ID NO: 30550 - DNA, 387 bp, Glycine max
ggctggcgatggaaactatgctcacaacaagtgacagagacagagtagaaccaaaagattcataataactaacattagaaactaggtgaaagtaactgcacagacacacaacacatcttccttaatttctccgtccatttccctcccataaataaatctttcatttccatctttcttgggtgatccaatggcgacccttttccagggattgggagttgtgaacccatcattggcttcttcaaactccaacaagttccatcttccttctcgtacatccctctcagagaggaaagatggcatttttgtggtcagatctgatgcaacaagggtaagcagccaagttctgaaagctggagctcgtaagcatgaattgttagttactaatgc

SEQ ID NO: 30551 - DNA, 384 bp, Glycine max
ggaacaagaaacgcgtctggatttaacagttgtagagagaaggaagaagatggtgcttccgcaagatttgataactgaaatcctgttaagattgccggtgaagtctctagttcgtttcaagagcgtgtgcaagtcatggctttttctgatatctgatccccgctttgcaaaatcacattttgaactagctgcagcacttgcagatagaattttgttcattgcatcttctgctcctgaactccggtccatagacttcaacgcatcacttcatgatgactctgcctctgttgcagtaacggtggaccttcctgcccccaaaccctattttcactttgttgaaataataagttcctgcagaggctttatacttttgcactgtttatc

SEQ ID NO: 30552 - DNA, 399 bp, Glycine max
gtgaaaacaccacaaagggggtggggatgaaaactaatcttacaacacgtgggtgaggcggaatgtaaccaccggattaataataactttcatttgcaactatgtgattgtaattgaactgacactccatacatatatattaaattatacgcccatataccttcgattaataaatctttcattaacatcttttttgggtgatccaatagagactcttttccatggataataagctgtgaacccttcatgggcttcttataactataacaagtactatctttcttatctaacatccttctaagataggaaagatcgcatttttgcggtcagatctgatgcaacaactggaaacaatcactttctaaaaacaggatcttataaacatgaattgttcattac

SEQ ID NO: 30553 - DNA, 387 bp, Glycine max
gtgagaaaatatagggaaaagaaaggtgtttgatgtaaagctaaacaaggaagatatatggaaaagattaataggtgagaaataaagtgaaaataactagtgggtctcttgccttttttatttcccacctatttcttattggcttaatgtcacttttggtctactatatttcagagttgttttgctttggtacatcaagttttaaaagtttcattctaatcatttttgttttcgaaatatatcgttttggttcttttttcaatttttcgttagaaacgttagtgttctggtaacctttaaattttaaaaaaggaccaaaatgatacattttgaaaacataaaaggacgaaaatgaaacttttaaaacttaatgtatcaaagtgaaac

SEQ ID NO: 30554 - DNA, 291 bp, Glycine max
cacccctccgagcggatgaaactttacgacagaaagaggaatgatgcagaataaatactctccattaatatgtaattggataggaatctcatgcacaagatgacatcaactactggcaggagaaaagaatggccaaagacgcaaaagtatgagcttgaactgttcatgcacatacaccacggatattgaacaaccgacctatactgttgattatcggatcctgcaacaatggtaaacgcacgctattatcgctagagacctgtgatgactcatatgatgctgaagcatcta

SEQ ID NO: 30555 - DNA, 363 bp, Glycine max
ggttagggagcccgtggagcaattacctatggaagaggatgaaatattatccccacgggaggaggaagaatcaattgatgaggttggtagttggtacttaacagttatcggtcttgtttggtttcattttatctcttcttcgtgtcatgccaatttccttcattttctttattatgctcgctttgatttctgattttgcacatcttgaattgggttcatacatgtatacttgtcaacatttgtattcattgttaaccatgtggaataacattgtgtgatccatgtagccggtcttacctagtgggataaggttttgttgtatagaagtgtgaaagttctaaatacacaagatagagaatttga

SEQ ID NO: 30556 - DNA, 437 bp, Glycine max
gattcgggcacggttataacccggttcgtggagcccgtttacaacgcggtgagggaggagttcaggaagcaggtgggaggcactacattcacgagcattggagccttcgatacgtgttttgtgaaaacctacgaaactctggcgccgccaattacgctgcacttcgaggggttggacctgaaactgccgttggaaaacagcttgatccacagcagcgcgggttcgctggcgtgtcttgcaatggcggcggcacccgacaatgtgaactcggtgttgaacgtcatcgccaactttcagcaacagaaccttaggattttgtttgataccgtcaataataaggttggcatagcccgtgaggtttgtaactagctggttggctacatttttatttatttatttattaatatgtaccagtggctttcttgattagctaacta

SEQ ID NO: 30557 - DNA, 381 bp, Glycine max
gatggtgaaacatggcaagctgaagttccagagattcagggaaacaagttgagagggggccctcagatgattcaattgagtttagatgggaagcggctctatgctaccaactcactatttagtacttgggacaaacaattttatccagagcttgtccagaaaggctcccacataatacagattgatgttgatactgagaaaggtggactgaaaatcaaccccaacttctttgtggactttggaactgagcctgatggtccttctcttgcccatgagatgagatatcctggtggtgactgtacttcagatatatggatttaaacatacgtgtcattatttccctttaataaacggatctgtcatatggttgtaatgagctac

SEQ ID NO: 30558 - DNA, 275 bp, Glycine max
gtacaaggacaagagtattgtcggaaatgacgggggtgaaggagctgttgaagatttaatagtagcaactaatgcaattgtggtgcctgtgggagctgctttggctattgctgttgctagctgtgcttttggagcacttgcttgctactggcgttcgcagcaaaagagtcggaagtattttcaccacctacactctctaaagaacatttgataattaggagggcctagaagaacgtggaagtaggaaattggaaaaaaggtacactttaaaggca

SEQ ID NO: 30559 - DNA, 420 bp, Glycine max
ctgagattggttgggtgaagctgaacgtggatggttcacgcgacccatacaaaagttcctccgctggttgtggtggtgttctgagggacgcatcagcaaagtggctccgtggctttgctaaaaaactgaaccctacttatgcagtgcaccagacagagttagaagccattctcacgggcttgaaggtggcttcagagatgaatgttaagaaactaattgtggagtcagacagtgactctgtggtgagcatggtggagaatggggttaagcccaatcaccctgactatggtgtcgtggaacttataaggacgaagcggcgtcgttttgactgggaagtgaggtttgtttctgtctccaacaaggcgaatcgtgtggctgataggctcgccaacgatgctcggaaattggcttgtgatgatg

SEQ ID NO: 30560 - DNA, 423 bp, Glycine max
ggagcggcggggcagaggaaggggcagagttttggagtttgaaagagaaaatattgattgcagttgagttctaatgagtaacgaatacgattacctgttcaagcttctcctaatcggagactcttccgttggaaaatcctgcttgcttctcagattcgctgatgactcctatgtcgacagctacataagtaccattggagttgatttcaaaatcagaacggtggagctggaagggaaaaccgtcaagctgcagatttgggatacagctggacaggagcgattcaggactataacaagcagttattatagaggagcacatggaattattattgtctatgatgttactgagatggaaagctttaacaatgtcaaacagtggttgaatgagattgacagatatgcaaatgacactgtatgcaagct

SEQ ID NO: 30561 - DNA, 387 bp, Glycine max
ggtaccaaaaacaaaacaagccaagtgaaagagagaagaaaagtcaaagacaatgtcagggatcattcacaagattgaggagacccttcatgtgggaggccacaagaaggaggaggagcacaagggtgagcagcaccatggtggagaatacaaaggggagcatcatggtgaacacagtactgaatacaaaggagagcatcatgttggtgagcacaagccggagcaccatggaggagaagagcacaaagaggggttcctagacaagatcaaggacaagatccacggcgaggagggtggcgccaccgccgagggcgagaagaagaagaagaagaaggagaagaagaagcatgaacatggccatgacagcagcagcagcagtgacagtga

SEQ ID NO: 30562 - DNA, 351 bp, Glycine max
gattcaattgtgattcttattagagatatccctgatgctaaggaaagtgggttgcttcatctttgtgagtttattgaagattgtgaattcacttatttgtccacacagatgctgcacttcctgggagttgaaggaccaaaaacttctgaccccagcaaatatattcgttatatttataacagagtacatcttgagaatgcgactgttagggccagtgctgtgagcacattggcaaagtttggtgctgctgttgatgcactaaagccccgcatatttgtactgctaaggcggtgtctttttgatagtgatgatgaggttcgtgacagagcaacactttatctgaacacactt

SEQ ID NO: 30563 - DNA, 298 bp, Glycine max
  modified_base (277)..(277): a, c, g, t, unknown, or other
gtatcagagagagtgagagaagagagagaatatttctgttcgtgcagatagatagatagatggctcggagctccacaagaatgaaatgggtctccatcttcacacttctattcctctcccactcgcccctcacaaccttcgcagaagatgggctagtggcgaatggagattttgaggttagcccatcaagtgggttccctaacgaggcgattgtggagggccccagcgaggtcccaaactggaagtcaaacggcaacgttgagctagtggaatcggngcaaaaacagggtgggatgat

SEQ ID NO: 30564 - DNA, 335 bp, Glycine max
gacagaacaatagtagcaagcagagccccaagacgagcttcaccttgcgccgaagggccacagatggttgaaaccgatatggatgccgaaactgttgcaaatgtggttccaccaaaggagactccaaacagtgttcccatctcttatcattcctcacactcacaccctcctgttaatgagaggattatttcatccatgaccagaagatctgttgctgcacacccgtggcacgaccttgagatagggcctggtgctccaacgatcttcaattgtgtgattgagattgggaaaaggagcaaggtgaaatatgaactggacaaaaaatcgggtcttat

SEQ ID NO: 30565 - DNA, 362 bp, Glycine max
cacacaagtgggacaaggaaagtttgttatttccaatagaatatcttttcccatgtacatgaacttaccgatatctgattaaatgcaggtggctgcaagttttgcgtcagaaggatccgtaatgaatgagttgaagcagtggaatgatttgtatggagaaggaggttcaaggaagaaacaacaactcacttacttcctatagattgtggaatgctacttttatttttggttttgtgaccattcatcctcaacgatacatttcaacaaaggaaggaatccttcaccagagatgttgaattgaaagcatgccgaaatgtcagagatcttatgattcccagaaaagctcgagttcttgcacacac

SEQ ID NO: 30566 - DNA, 192 bp, Glycine max
ggaggagggaatgggggtactcacaatccggagacatcttttcttactccatcgaagccggtgatttggattacacacatttttgtatttgacagctccacactaacatataatggtaacattacattcatcagaacggctgcattactgataaaagaagccatacaagccatcagtgggggccatgaatac

SEQ ID NO: 30567 - DNA, 434 bp, Glycine max
gtacaaggacaagagtattgtcggaaatgacggaagtgaaggagctgttgaagatttaatagtagcaactaatgcaattgtggtgcctgtgggagctgctttggctattgctgttgctagctgtgcttttggagcacttgcttgctactggcgttcgcagcaaaagagtcggaagtattttcaccacctacactctctaaagaacatttgataattaggagggcctagaagaacgtggaagtaggaattggagacaagtacacttcaaggcatgaggtgcatagcagctttcataggcaaccaattattatggtctcactccaaagagccttgccaaagttcctttttgaatctatcctgaatagaaaaatgtacagaatacaattcttgatttggagaccattactgatctgtgctattttctttcacttttt

SEQ ID NO: 30568 - DNA, 356 bp, Glycine max
gaagacaagagtgattagggttttggtttggtgtttttcttaagcttgagatcaggaattaatttcagaggttcagagaatggcaacggattcttctaatggtaatggacatcaccaaacaacaacaaagcaacctcctttgccgtctcccctgcgcttttccaaattttttcagtccaacatgagaatcttggttactggaggagctggattcattgggtctcacttagttgacagattgatggaaaatgaaaaaaatgaggtaattgttgctgacaactacttcactggatccaaagacaacctcaaaaaatggataggtcatccaagatttgagcttatccgtcatgatgtca

SEQ ID NO: 30569 - DNA, 430 bp, Glycine max
gagagtgagaaagagaaagagagaattcgtgaggcctaatttcggaaagatcggcgatgactgcctccaaggatcgcgagaacttcgtctacatcgccaaactcgccgagcaggccgagcgttacgaagagatggtggaatcaatgaagaacgttgcgaatctcgacgttgaactgacggtggaggagcggaatttgctttctgttgggtacaagaatgtgattggtgctcgcagagcgtcctggaggatcctgtcttccattgggcagaaggaagaaacaaaagggaacgagttgaatgcgaagcggattaaggagtacagacagaaggttgaattggagctatcgaacatctgtaatgatgttatgagagtgattgatgagcaccttatcccttcggctgcagctggtgaatccactgagttgtacta

SEQ ID NO: 30570 - DNA, 423 bp, Glycine max
gacattttcccccctacaaaaagatccattgaagctttctctgagcatttcaccaaggaaggattggtggccttggtggagtataatgaaaagaaaatttttgaggtgaaacttaaggaaatgaagtcttctttaacagcacagataacagaggaggctgatacatctgaagtcattgagactgtgaagctgcgagttagagatgctaaattgccggaaattgaggtggtgcggatcttgtgggatgttttaatggatgctgttcagtggtctggaaaaaatcagcaacagaatgcaaatgcagcccttcgtcaggtaaaaacttgggcagaattgttgaatacattctgcaccagcgggaaacttgagctggagctgatgtacaaagtacagatgcaatgctatgaggatgctaaactgatg

SEQ ID NO: 30571 - DNA, 430 bp, Glycine max
gagagtgagaaagagaaagagagaattcgtaaaccctaatttcggaaagatcggcgatgactgcctccaaggatcgcgagaacttcgtctacatcgccaaactcgccgagcaggccgagcgttacgaagagatggtggaatcaatgaagaacgttgcgaatctcgacgttgaactgacggtggaggagcggaatttgctttctgttgggtacaagaatgtgattggtgctcgcagagcgtcctggaggatcctgtcttccattgggcagaaggaagaaacaaaagggaacgagttgaatgcgaagcggattaaggagtacagacagaaggttgaattggagctatcgaacatctgtaatgatgttatgagagtgattgatgagcaccttatcccttcggctgcagctggtgaatccactgtgttttacta

SEQ ID NO: 30572 - DNA, 367 bp, Glycine max
ggactgaggggtttaagagcataagtggcttgtgcggttgagctgaacactcagttgttgaaccatgctttctcgcactcgcacctttcctctcatttccctcgcttccaaagtgtgtgcccctccactggaagccctctactccacccacattgtcggcgacaagcccgttctggttcgggattttattcattctgcactctaccatccgttacatggctacttctcccaaagatcgcggtccgttggagttcttcctaatgctattaagttcaaccaacttcaaagccggaaagcttatatgaagtacttggataatatttacaagcagagtgacatatcatggtttacaccagtgggacttttt

SEQ ID NO: 30573 - DNA, 375 bp, Glycine max
gacggctaaaagctaaaaatcatcgaagtactcaaattagcatggctgtcacggttgcattcttgaatttgatcatcatgttttcagtagtctctacaagcaagtcactgagcttaaactactattcaaaaacatgccctgatgtggaatgcattgttgccaaggcagtgaaggatgccactgctagggacaaaactgttccagctgcacttctgcgaatgcacttccatgactgtttcgttcgggggtgtgatgcctctgtgctgctaaattcaaaaggaagcaacaaagcagaaaaagatgggccaccaaatgtttctttgcatgcattctatgtcattgatgcagcgaagaaagcactagaagcttcatgcc

SEQ ID NO: 30574 - DNA, 275 bp, Glycine max
ggatctaaggataacgttagaaaaatagacaggtattgttagtcatatgatagaaattgcactatgatagttgtatttgtattatgacttcaaaaataccaaaataagtcatggtggtatttatttcatgaagttttgctgaagtaaattccagggtacaagtgttaactgttaactagagatacctgaaggctgatgctcaaaaaggcaaatatattcatttttttaattttttcataaaattatattttacagctcaacaaaattaaatatca

SEQ ID NO: 30575 - DNA, 389 bp, Glycine max
gggggaaagcaagagtagtgacagagagaggcgaggatcgttcacataaaacatcgacagagatcgacgaggaaaagctaagcctaacaatgtggagctccaaaacgacattgatgtttggcgtcgcagccattgctctgatgatgtttctctcatctgcttcagcggacgacgtcgttgcactcacagaggaaaccttcgaaaacgaggttggcaaggatcgtgccgctctcgtcgagttttacgctccctggtgtggacactgtaaaaggcttgcaccggagtacgaacagctcggaacgacttttaagaaaacgaagtccgttttgattgccaaggtggattgtgatgaacagaaaagtgtttgtagtaaatatggggtatctggt

SEQ ID NO: 30576 - DNA, 397 bp, Glycine max
gggagaaggtaattgggatgcatgacacaaaaagcgtttgcataagggcactagcaaggttgccagtggtgatacccatatggttcttggccataatcttccctttctttgggcccataaactctgcagttggagctcttctggttagtttcacagtctacatcattcccgccacagctcatatgcttacttacagaaaagcctcagccagacagaatgctgctgagaagcctcctttctttatgccaagctggactgcaatgtatgtcttcaatgcattcattgtggtgtgggttttggtggttgggtttgggtttggaggatgggccaacatgaccaacttcgttaagcaaattgacacatttgggctctttgccaaatgctaccaatgcaagcc

SEQ ID NO: 30577 - DNA, 389 bp, Glycine max
ggattctccaacagccacaaaaagcagaacagatgatggtcttatatgggtgagtcaatggaactctttgcaacatcctgttgcatctgcattcttagctgctgtttacagtgactatatgctaacatcgcagacaccaaaactaaaatgtgattcagattcctttaccccatcagatcttcgagactttgccaaatctcaagctgattacgtattgggcaagaatcctatgcatatgagttttctggtgggctatggagataaatacccacaatttgtgcatcataggggtgcttcaattcctgctgatgcaaaaactggctgcaaggatggcttccagtggcttgaatcatctgatcctaatcccaatgtagctactggagcacttg

SEQ ID NO: 30578 - DNA, 387 bp, Glycine max
  modified_base (99)..(99): a, c, g, t, unknown, or other
ggcattttaagaggcaataaggggcacaagatcaagggtactgtggtgttgatgagcaagaatgtgttggacttcaacgaaatagtgtccactactcanggtggtttggatggtgctgccaccaccatcttcggtgctgacaccgatattgatggtggagttgtcaatggagctactgacatcttcagtcgcaacattgccatccagttgatcagtgccaccaagactgatggacttggaaatgggaaagttggaaagcaaacctatttggagaaacatctttcttcgttaccaaccttgggagacaggcaagatgcattcagcgtttattttgaatgggataatgattttggaattgcaggagcattttacatcaaaaattttatg

SEQ ID NO: 30579 - DNA, 312 bp, Glycine max
ggaggttgaagtgtgttgtgttgtggcaaagctcagaaaaagagagagagattgaagaagcgatttttttatatgaaattttgaagagtgaatgaaaaatctcaatcccatggatgagcaattgaatttgagctgaatcggcgtcgtttcgatttctctcagtcacacactactgactcggccagattcaagtaaacgcttcttctcagcaaaccctagatattggagattgctgtgatgacatcttcacctacctatctgcatgcagggctgaattggtacctctgggttttatctcatgctattttaagt

SEQ ID NO: 30580 - DNA, 412 bp, Glycine max
ggagcagaggaagaacaaaggagaagagaaaaaatggtgggtaatgaaatagtagtaccaatggacgacaaagcgaagaggatgcgagatctgctatccagtttctactccctagacccttccatctccaacaccaccttcaaacacgcttctctcgacgacatcaattccacctccttcgatcccgatcagtacatgaacattctggcacacaagtccaatttggaaggccttctacaacgccacgttgcaatggctgctgaaatcaagaatctcgacaccgacttgcaaatgctagtttacgagaattacaacaagttcatcagtgccacagacactataaagaggatgaaaagtaacatttcggggatggagacgaatatggagcagcttcttgagaaggtaaccgtag

SEQ ID NO: 30581 - DNA, 373 bp, Glycine max
ggaggggacgaggaacatagtagaagagaaaaaatggtgggtaatgaaatattagtaccaatggacgacaaagcgaagaggatgcgagatctgctatccagtttctactccctatacccttccatctccaacaccaccttcaaacactcttctatcgacgacatcaattccacctccttcgatccctatcagtacatgaacattctggcacacaagtccaatttggaaggccttctacaacgccacgttgcaatggctgctgaaatcaagaatctcgacaccgacttgcaaatgctagtttacgagaattacaacaagttcattaatgccacagacactattaagaagatgaaaagtaacatttccgggattg

SEQ ID NO: 30582 - DNA, 403 bp, Glycine max
gagaagaaggaggagctttgtgctgatcttgagcttaatcaagttatagatcgtaatgttggtgatctttcgggtggtgagctccaaaggtttgccattgcggttgttgcgatccagaatgctgagatatacatgtttgatgaaccttctagttatcttgatgtgaaacagaggctgaaagctgcccaagttattcgatcattgcttaggcctaatagctatgtaattgttgttgagcatgatcttagtgtcttggactacttatcggactttatttgctgtctatatggtaaacctggtgcatatggagtggtgacacttcctttctcagtcagagaaggaattaacattttcttggctggctttgttccaacagaaaatcttaggttccgtgatgactcac

SEQ ID NO: 30583 - DNA, 384 bp, Glycine max
  modified_base (339)..(339): a, c, g, t, unknown, or other
gatgaaaaagaaggatggtgatcatgatgacgacgaagatgaggatggtcctcgtgaagcaaatccagaggggagagtagaaaagtacattggagtgaaagtgaaggtctcatttactggacaaggggagacacagtccatgaagcagttgtctgggggtcaaaaaactgttgtcgcccttacacttatctttgccatacagcgatgtgatcctgctcccttttatctatttgatgagatcgatgcagcgctggatccacagtacagaactgctgttggaaatatgattcgtcgcttggtgacatagcaaacactcaatttatcacaacaacattccgnccggagctagtgaaagttgctgataagatatacggagtaacacat

SEQ ID NO: 30584 - DNA, 385 bp, Glycine max
ggacatagagagggaaggatggcagtggcagagattctaaaccttggaggcccgccaagcttaagtgggaggaaactgccgccatgccgttcgaattcccaaaactggacttgtttgcagcacaagctcaagtgcaacggcagattcctttgccttttctccgacaacagaaaggaggaacaagccagaaaagcattagaaggtgcactaagtgggaagaaaaatgaatttgacaaatgggacaaggaaattaaaagaagagaagagctgggaggtggaggtgacactggtggaagtggttggtttgggtgggggtaatggtttggctgggctaatgatgataatttttggcaagaagcaaaacaagctattcttactatacttg

SEQ ID NO: 30585 - DNA, 392 bp, Glycine max
gatcatttatttgtcatccaattttcgctctttcggtctctccaaattgagttcagagtcaccaccgaatccgttcctacaatggcgacggtgacgttttccttttccgctaaaaccttaactctaccctatcaccccaaaacctcaatctcgagcttcgctccggtaacgaatcttcgcctctctcattctatcgtcacccgaacccgaaattgtaaccggattcgggcggcgctggatggggatttctcggcgaaaaggagcaacaacaacgagcagagggagacgataatgttgcccggctgtgactacaaccattggctgattgtgatggagtttccaaaggaccctgcacccactcgtgaacaaatgattgacacttacctcgacac

SEQ ID NO: 30586 - DNA, 384 bp, Glycine max
gagtgttgagctgtgtgacatgtaacaccaaactcactcaaacttacctttgtttttctcctttttctcagtttcattctcttgctcgtggacatggatgtttgccgaaatgtatcagtttcttcaagtgagtgtcagcaagagcttcccacccttgatgaccttttctctcatcagaacacggaagtggattttggcctggaatggttatcagtgtttgtggaagactgtttctctagtaggccaagctgcctcttggcacctggtggtgttcaaaccacaagcactagcacaagcaccaagccttcttcaggcactatattgcaaagaccccaacaattaagtcatcactgtcctttgcagaattttgctgtgccagggaaa

SEQ ID NO: 30587 - DNA, 104 bp, Glycine max
ttattttttagctgtgtgacatgtaacacccggcggactcaaacttacctttgaatctctcactttatctgagattcattatattgctcgtggacataaatgtt

SEQ ID NO: 30588 - DNA, 385 bp, Glycine max
ggaagaggggagcgcaaggaacttgataggatctatgattatgatgtctataatgatttgggcaacccagacgagaatgacgatctagctcgtcctattcttggcgggtctagtaagcatccataccctcgcaggggaagaactggtagaaaaccaacaaagaaagaccccagatgtgagagaccaaccagcgacacttacatcccgagagacgaaaattttggtcacttgaagtcatcagacttccttacatatgcaataaaatccttaactcaaaacgttttacctcaattcaacactgcatttggtttcaataatgagtttgatagcttcgaggacgtgcgttgtctctttgatggcggagtttatctccctacagatgtac

SEQ ID NO: 30589 - DNA, 324 bp, Glycine max
  modified_base (159)..(159): a, c, g, t, unknown, or other
ggccattgttgctggcatcatcccgagctgctgttattcgcaccgcaaacaaacagtgagccatgggcggaggaaagaacacgcgcatgtgcaaacggaaaaagggtggtaagaagaagcagctgatccattgccaagaaggattggtatgacattaangcccgttatatttttgaggtgaaaaatgttggcaaaaccgtggtatttcgtacgcagggtaccaggattgcttctgaaggacttaaacatagagcgcttgacgactacttggctgatcttgatggggatgaggatcatgcattgaagaagattatgttgagagct

SEQ ID NO: 30590 - DNA, 412 bp, Glycine max
ggagcagaggaagaacaaaggagaagagaaaaaatggtgggtaatgaaatagtagtaccaatggacgacaaagcgaagaggatgcgagatctgctatccagtttctactccctagacccttccatctccaacaccaccttcaaacacgcttctctcgacgacatcaattccacctccttcgatcccgatcagtacatgaacattctggcacacaagtccaatttggaaggccttctacaacgccacgttgcaatggctgctgaaatcaagaatctcgacaccgacttgcaaatgctagtttacgagaattacaacaagttcatcagtgccacagacactataaagaggatgaaaagtaacatttcggggatggagacgaatatggagcagcttcttgagaaggtaaccgtaa

SEQ ID NO: 30591 - DNA, 427 bp, Glycine max
ggcagccactctgtgagagaaagagatagtgtggtagagagagaggagcggaggagagaaaatgacgacgaggttcaagaagaacaggaagaagagaggccacgtcagcgccggtcacggtcgtatcgggaagcaccgcaagcatcccggtggtcggggtaacgccggtggcatgcaccaccaccgcatcctcttcgacaagtaccatcccggtttcttcggaaaggtgggtatgcgctacttccacaaactccgcaacaaattctactgccccatcgtcaacattgataagctatggtccctcctaccccaggaggccaaggacaaggccaccgccgacaaggcgccattgctcgatgtcacccagttcggttactttaaggttttgggtaaaggggttttgcctcagaaccagcctctggtcgtg

SEQ ID NO: 30592 - DNA, 424 bp, Glycine max
gctatctccgaaggtgcaacatcctttcttttcagctgaatatcaatatgtggggatcttcatggttgcttttgcaatactgatcttcctttttctgggctctgtggaaggcttcagtactaagagccagccctgcacatatgataagagcaagctatgcaagccagcccttgcgactgcattgtttagcactgtatctttcttgcttggtgctataacttcagtcctatctggtttccttgggatgaaaattgcaacctatgccaatgcaaggacaaccttggaagccagaaagggagttggaaaggctttcattactgcatttaggtctggtgcagtgatgggtttccttcttgcagcaaatggtcttttggtgctctacattaccatcaatctcttcaagctatattatggtgatgattgg

SEQ ID NO: 30593 - DNA, 280 bp, Glycine max
tttggctttatacgaagatacaacatcctttcgtttcgctgaatatcaatatgtggggatcctaatccttactttagcaatactaatcttcctttttctggactctgttcaacgctacactactaatatccatacatacacatatgataatatcatgctatactagccattccttgctaataaattatatatcactgtatatttctagctttattctattaacttcaatcctatcttatttactttatattaaaattgcaacctatactaatacttatac

SEQ ID NO: 30594 - DNA, 392 bp, Glycine max
ggagcagacaaagactatatctaaattcatctggtaggagacaaggtagtgaaattgttatttttgtctacctggagtccatatagcaagaagatatttgcctggatcatcaggctctcgtgtgtcccactgtaatgcacaaataattaataaaagatgaacatacagggtaaagcatagctttgattaatagatacatcaatttactaaccccttgtagaagaggatgcgtatctgggagttcataactgtacaagagtaaacacaatcaacataaattgttagaaatttcccctacgttagcatggtggttgtgatgtctgctaaactctctggttttattacatgcaagattcttttacactcatatttgaatattggtggatttataa

SEQ ID NO: 30595 - DNA, 177 bp, Glycine max
cgggaagaggagtggggcacaatcagatcgagattgaagtctgcacttctcgcaactgcaaatactatgactctttctctcactgtgatggatccttcatcagacgaacaagcaaacatacaaacacacataagatgaatttcctgatgcgctccaccacacacgtctactccgaca

SEQ ID NO: 30596 - DNA, 164 bp, Glycine max
gggctttcatttgatttgatccaaggccaatcctctataataacaacgagaagtgatacaaacaataaatgatgagttcgatagtctcataagatttagctttcattaactgacacatatattgtattaaattaaaaagcctcaatgttgtgaagatatactta

SEQ ID NO: 30597 - DNA, 383 bp, Glycine max
  modified_base (237)..(237): a, c, g, t, unknown, or other
ggggctcagcaagtatttccaggcaattgtgacagaagaggatggaatggagtcaatagctcatagatttctttctgctgctgtcaagttggatcggaaaccttccaagtgtgtggtttttgaagatgatcctagaggagtaactgctgcgcacaattgtacaatgatggccgtagcattaattggagctcatcctgcgtatgatttggggcaggctgatcttaccgttgctaactntagtgaactttctgtgatcaacttgccgaaactattttcttaccagggttcttcatttatggacttacagaagcagatcatagagaaaactcctcccaaaaggaaacttacgatagacaccattttttaatacattttccttccca

SEQ ID NO: 30598 - DNA, 96 bp, Glycine max
gaagacaggagagagagaagctgcgcaccttgtcatactagtgctgattgctgaaactgccatcgatcgccatttgcacaaagatcccaacaacac

SEQ ID NO: 30599 - DNA, 384 bp, Glycine max
gatagaaagaatgagcaaacagctgccatactgaagatgcaagcagttcaactagctgaaatggaattgctttataaggaagagcaggttctcagaaagcgatattttaataccatagaagatatgaaaggcaagataagagtttattgtcggttaagacctcttagtgaaaaagagattgcaagcaaagaaagagattctcttactactactgatgagtttactgttgagcatccttggaaagatgataaaccaaaacaacacatttatgaccgtgtgtttgatggtgatgccactcaagaagatatatttgaagatacaaggtacttaatgcaatctgctggggatggttataatggttgcatatttgcttatggtcaaact

SEQ ID NO: 30600 - DNA, 427 bp, Glycine max
ggcagccactctgtgagagaaagagatagtgtggtagagagagaggagcggaggagagaaaatgacgacgaggttcaagaagaacaggaagaagagaggccacgtcagcgccggtcacggtcgtatcgggaagcaccgcaagcatcccggtggtcggggtaacgccggtggcatgcaccaccaccgcatcctcttcgacaagtaccatcccggtttcttcggaaaggtgggtatgcgctacttgcacaaactccgcaacaaattctactgccccatcgtcaacattgataagctatggtcccttctaccccaggaggccaaggacaaggccaccgccgacaaggcgccattgctcgatgtcacccagttcggttactttaaggttttgggtaaaggggttttgcctcagaaccagcctctggtcgtg

SEQ ID NO: 30601 - DNA, 224 bp, Glycine max
gggcgagtgaagtagacacttgaaataatgccaagtgtactaaatgtcttagtcttaagaggggggaaaaactggaattccaatgattcttaatttcttacaatccaatctgcaaactgagtgagatatataacttgtttttgatttcttcctcatcattttgcatatacaaagattaaaatggaaaggttttttggaaattgcttcaatatgattttgctgat

SEQ ID NO: 30602 - DNA, 76 bp, Glycine max
  modified_base (66)..(66): a, c, g, t, unknown, or other
ggttcaagcagcaagcaatggagggaagagagagcaaatcttctctcacctcacaaacggaacctngcgacaaccc

SEQ ID NO: 30603 - DNA, 414 bp, Glycine max
gagagcaagagtgaagagcgaagagaatggctcccaagggtttaatctttttggctgtgttatgcttctcagcactgtcactgagtcgttgtcttgcggaggataatggacttgttatgaacttctacaaggaatcatgccctcaggctgaagacatcatcaaagaacaagtcaagcttctctacaagcgccacaagaacactgctttctcctggctcagaaacatcttccatgactgtgctgttcaaaagtgtgatgcttcacttgtgctggactccacaagaaggagcttgtctgagaaggaaacagatagaagctttgggttgagaaatttcaagtacattgagaccatcaaagaagctttggaaagggaatgcccaggagttgtttcctgtgctgatatcctcgttctct

SEQ ID NO: 30604 - DNA, 408 bp, Glycine max
ggagctgaaaccgagaagaagaagatggagatgtatcagatctggagcaggagaatagcgttgggagcgttcgcgtttgttctgcttttcctatcggcctcagcagacgacgtcgttgtgctctctgaagataacttcgagaaggaagttggtcaggacagaggagctctcgttgagttctatgctccttggtgtggacactgcaaaaagcttgctccagaatatgaaaagcttggtagcagcttcaagaaagccaaatctgttttaatcggcaaggttgactgtgatgagcacaagagtttgtgcagcaaatatggagtctctgggtacccaacaattcaagggtttccaaaaggatctcttgaacccaaaaagtatgaagggccacgcactgctgattcacttgct

SEQ ID NO: 30605 - DNA, 107 bp, Glycine max
aaacaacagaaaggggagctttattctaaaaaaacaacatcaaaatgccggaggtcttaagcaccataattgcgcaaggagcaatcacctttattctaatttttcta

SEQ ID NO: 30606 - DNA, 188 bp, Glycine max
ggagcgagagacgaagagaagaggaaagagcgcgttatgtggcctcttgtctcgttatttgcagaaacacccgcaaagccagaacagaaatcgcatataaaatgcgaaaagaaatgaattcaatgttcggagatctgcacaagatctctctccgtcaaactttctttaccccgtcctcataacatatt

SEQ ID NO: 30607 - DNA, 383 bp, Glycine max
  modified_base (334)..(334): a, c, g, t, unknown, or other
ggaaattaaagacactactaaagaaggatatagttttgaagagctatgcatcaagaaagaagccattgagggagaagagaagttttgtgcaaaatccttgggaacagtaattggttttgccatttcaaagctgggaaagaacattcaagtactttcaagttcctttgtcaataagcaagaccaatacactgtggaaggagtgcagaatcttggagacaaagcagtgatgtgtcataggctaaatttcagaactgcagtattttactgccatgaagtccgtgaaacaacagctttcatggttccattggtggctggtgatggaaccaaaactcangcacttgctatttgccactcaaatacttctggaatgaatcatcaaatgc

SEQ ID NO: 30608 - DNA, 215 bp, Glycine max
gggtggagagtggtgagtagtgaccaaagcaaacgcactcactctattattgaagggaagatgaaagatgaagatggcacaccccaaagtgcaggtaagggacagtacaagttgtgggtgttgggtgctatcattcttcttgctctttggtccatgttcactgcttctctcactctcaaatggtcagctgggaacctcaaccgtgacttcgattc

SEQ ID NO: 30609 - DNA, 175 bp, Glycine max
caccaacaagggagctagcacagcagatcgagaaagttatgcgagctcttggtgattacttgggagttaaggtccatgcttgtgttggtgggacaagtgttcgtgaggatcagcgcattctccaagctggtgtccatactgttgttggcactcctgggcgagtgtttgacatgct

SEQ ID NO: 30610 - DNA, 363 bp, Glycine max
ggctgagagtgttgaaggaactgtcattgatcgtgatggtgatgaagttacagatggtggacaatattcagctggtccttcaaaacgtgcacgtgactctgatattttcgacacatattgttcacctcaacaaagagactcatctggtgccggtccgagtcattcaatgggtttagaggcttacattactggaaatcgagtttcttcataccgtcaaggtagtgacctcccaatgggtatccaatcagctagagactcaacccgtgcatcattgtgtattgcaatggacacaatatgtcatagtgtgaatggtgattctatggaaagtgttgaaaactaccctggaaaccttgatgatgttca

SEQ ID NO: 30611 - DNA, 433 bp, Glycine max
ggttcaagcagcaagcaatggagggaagagagagcaaatcttctctcacctcacaaacggaacctcgcgacaacccccattcccgtttctccactccaatgcaacaacaccaatctcatgaaatggtggctttgaagaaggcatatgcggatgtgattctgaacactgtgaaggaggctgcaggtcgggtaatggtggcggaaaggagagctcttatgttccagcaagagcatgcttcatcgaaagaagaggctcttcatatgttaatgcgtttgaagcagatgatggatgctaagacagctgaagcagaaaaggcatcattggagaagcaaagaaaaattgatgagcttgaagcacaattgaatgaagccgaggatatcataacagatctaagggcagagttgaagcttgtatatctggagttagagatggc

SEQ ID NO: 30612 - DNA, 353 bp, Glycine max
ggatcgcagactcaacactctcgctagacacttgcttccgcaaatggcttctcacgacagcatctccgcttctccaacctccgcttctgattccgtcttcaatcacctcgttcgtgctcccgaagatcctatcctcggggtaactgtcgcttataacaaagatccaagtccagttaagctcaacttgggagttggtgcttaccgaactgaggaaggaaaacctcttgttttgaatgtagtgaggcgagttgaacagcaactcataaatgacgtgtcacgcaacaaggaatatatttccgatcgttgggcttgctgattttaataaattgagtgctaagcttatttttggggct

SEQ ID NO: 30613 - DNA, 423 bp, Glycine max
tggggttcaagcagcaagcaatggacggaaagtagagcaaatcttctctcacctcacaaacggaacctcgcgacaacccccattcccgtttctccactccaatgcaacaacaccaatctcatgaaatggtggctttgcagaaggcatatgcggatgtgattctgaacactgtgaaggaggctgcaagtcgggtaatggtcgcggaaaggagagctcttatgttccagcaagagcatgcttcatcgaaagaagaggctcttcatatgttaatgcgcttgaagcatatgatggatgctaagacagctgaagcagaaaaggcatcattggagaagcaaagaacaattgatgagcttgaagcacaattgaatgaagcccaagatatcataacagatctaatggcagaatttaagcttgtatatctgg

SEQ ID NO: 30614 - DNA, 374 bp, Glycine max
ggagcaagagtgaagagcgaagagaatggctcccaagggtttaatctttttggctgtgttatgcttctcagcactgtcactgagtcgttgtcttgcggaggataatggacttgttatgaacttctacaaggaatcatgccctcaggctgaagacatcatcaaagaacaagtcaagcttctctacaagcgccacaagaacacttgtttctcctggctcagaaacatcttccatgactgtgctgttcagagttgtgatgcttcacttgtgctggactccacaagaaggagcttgtctgagaaggaaacagatagaagctttgggttgagaaatttcaggtacattgagaccatcaaagaagctttggaaagggaat

SEQ ID NO: 30615 - DNA, 405 bp, Glycine max
gaagtagacagttttttgggtgagcgtcgtggaacagatcacgaggctatgttaaacatgaaaactgaattcatggctctgtgggatggatttacaacagatcagaatgctcaagttatggttcttgcagcaactaatcgtccttcagaacttgatgaagcaatacttcggcgtcttcctcaagcctttgaaattggaattccagaccaaagggagagggctgaaatattgaaggttgtcttaaagggtgagagggttgaagacaacatagactttggtcatatagctggtttgtgtgagggttacactggttcagatctatttgatctttgcaagaaagcttgctattttccctatagagaactactggatgaagagaagaaagggaaacaatctcatgcccct

SEQ ID NO: 30616 - DNA, 173 bp, Glycine max
tggggatttttttctccaacacaatactaaacactcggtttgttgcctctctaatcaatacttcctaaaacaccctccaacctccacctctgattccatgtttaattcccaaaaaaatacattcaatgatcctatatctgcacaacatctctcttatacaaaaaaaatttacc

SEQ ID NO: 30617 - DNA, 392 bp, Glycine max
ggaaacgaaagagaatggagaacagggtaatattacaggaatggtttgaccgcgttgactcggagaaaagtggaagcataacagcggtacagctgaagactgctcttgctgtgggcaacctggaatttccgctctcagttgttcagcaaatgatcaggatgtacgatttcgacaggaatggtactatgagctttcaaagtatctctaactaacctattatccaattcaaccattttgtctatcactctctctggttctaaccctaaactctcaaaatttgttgcactcaacaacttctttcttaaggttcaacatgcattttctgatctagagagattaactaaatgatggacgaccttttggaaagaaactaataatatgaaggctcataa

SEQ ID NO: 30618 - DNA, 85 bp, Glycine max
  modified_base (84)..(84): a, c, g, t, unknown, or other
ggtggactaactagcgaaagaaaaatagaactaggaaaattcttaaaagaaaaaggtggaacttactatatatgatgatgatgna

SEQ ID NO: 30619 - DNA, 259 bp, Glycine max
ggtttttgagactgtgagcacttagcagagaggaagaaagatgatcatccctgttcgttgtttcacctgcggaaaggtctcttcgcatcccaaatactctgattcttcctcttttcactttatttcgtaaattaaaaacaaaaaatgtctggactttatgtgtgattaaggtttacggtttacggttttggttaattaatgatcaatgtgacttcttttctccgatttaggtcattggaaacaaatgggatacctattt

SEQ ID NO: 30620 - DNA, 224 bp, Glycine max
ggagcagtgtgaatgattccattgtggaacagatggctgggaggctttctatgatttctttcttggatgtgagctactgtattaaaattggtccctatgcgcttgagatgattggcatgaactgcaagcttctataagggttgtgtcgaaacatgcacccattggatactgcggagaagccgcatcaagacgatgaagcctatgcaattgtctccacaatgcct

SEQ ID NO: 30621 - DNA, 107 bp, Glycine max
gacacacagcaagccaattactctctgctcgctgatggctgaaatagtgatactggcatatgaaattttgctcccaaaattttgattttttgtatttagggaaaaat

SEQ ID NO: 30622 - DNA, 427 bp, Glycine max
tgtgggtttaagcagcaagcaatgcacgctagagggatcgaatcttctctcaccttacaaacggtacctctctacaacccccatttccgtttctccactccaatgcatcaacaccaatctcatgaaatggtggctttgaagaatgcatatgctgatgtcattctgaacactgtcaaagatgctgcatgtccaataatggtggccgaaaggatagctcttatgttccagcaagagcatgcttcatcgaaagaaaatgctcttcatatgttaaatcgtttgaagcagattaaagatgctaatacagctgatacacaaaaagcatcatttgagaagcaaagaacaattgatgagcttgaagcacaattgaatgaaaccctagatatcataacagatctaatggcaaagttaagcttgtatatcttgagtt

SEQ ID NO: 30623 - DNA, 351 bp, Glycine max
gactccaagccctcaccaaatacttctcttggcattttgtgtcccttctctctttctcttgctcgatattttccaaccaaaataattattaaaaccaaacgtagctaggcaccactgctaggaatggcaagtgagatatttcttgcccttctgatcacaacctttgtggttgcagcctctgctggtaacttcaaccaagactttgagataacatggggtgatggtcgtgccaaaatcctcaatagtggggaacttctcacctttgtcctagacaaaacctctggctctggatttcgttctaagaatgaatacttgtttggaaaaattgacatgcaactaaaactcgtgcct

SEQ ID NO: 30624 - DNA, 411 bp, Glycine max
  modified_base (332)..(332): a, c, g, t, unknown, or other
ggagaaggaaaggctgaagaacacatagagagagagagagaagtgcagaaaaaatgagactgttcgatccatggcctgttttcttcaagagagaatggaagcggaattggcccttcttggttggattcgccatcaccggaactctcatcaccaaactttcccttggtctctctgaggaggaagccaaaaagtcgaaattcgtccaggcacacaagaggtgactttagaatggaagatttgcagtggctttgcacattgtattagatgtgtgaaaagagcttttgttgtaataaatgaagagagatgttgtatacactccatgttcctatttncattttggttggttactttaatgtgattgagaaattcatacctagcagttctgaatcgatggattcacattatgattag

SEQ ID NO: 30625 - DNA, 393 bp, Glycine max
  modified_base (388)..(388): a, c, g, t, unknown, or other
gacaccagtgtgacagtgtgtagtgtgttcgtgtccgtgtctcaagttgaaacgttgtgtcgtgtttgtcattgtctaagaaagagggagaaatgggagtagtgaacagaagaaattctgcagctcataccagtaaccaaaacaaaacaacttcaattcaactccctttaggaatttttggaacagtgctggcagtgttgttcattgggtttgtagcatggagttatcaaactattcaaccttcttctccaaagatatgtggatctcttaatggtcccactattacagcacccagaatcaaactaagagatggaaggaatttagcatacaaagagcatggtgtcccaaaagatgttgccaagcataaaatcatctttgtccatggttntgatg

SEQ ID NO: 30626 - DNA, 269 bp, Glycine max
gggagagaaaaacgaagagtgagtcaccgttccgtgttcccgccgagtcggtataaacgagtgagcgagtcacaactcaccgcgctgcatggaccctctagaagctttggtcgcccaaatccaagggctttcgagcactcccggcgacctcactcgcctccacagtgttctgaagcaagccgatgactcgctccgatccgagtcaactcgcctcgctccgattctcacccagctcgaccccttcattcattccctcgggtttctctaca

SEQ ID NO: 30627 - DNA, 385 bp, Glycine max
ggttctagtgtgtgattgtttgttgttgtaactcggtcttcttcttttgttgttctgcgtttgtgtttgttttttctctcacctgaaaatgtcttgctgcggtggtaactgtggttgcggaagctcctgcaagtgcggcaacggctgcggaggctgcaagatgtacccagacttgagctacactgagtcaaccaccaccgagaccttggtcatgggagtggcacctgttaaggctcaatttgagggtgctgaaatgggtgtgcccgctgagaacgatggctgcaaatgtggaccaaactgctcctgcaacccctgcacttgcaagtgaggtgttgggagagcaagcttcaagcagagatagcccttaattaggaataatgataaa

SEQ ID NO: 30628 - DNA, 135 bp, Glycine max
ggagccagatgaagttctgcaagccgtttccaaatctgggaagaagactgcattctgggtggatgaagcaccacaatctaaaaacaagcctttaaaaagtgcacctgtttgctcaaaaaacaagcctttaaaaac

SEQ ID NO: 30629 - DNA, 327 bp, Glycine max
  modified_base (53)..(53): a, c, g, t, unknown, or other
  modified_base (58)..(58): a, c, g, t, unknown, or other
ggttctagtgtgtgattgtttgttgttgtaactcgttcttcttcttttgttgntctgngtttgtgtttgttttttctctcacctgaaaatgtcttgctgcggtggtaactgtggttgcggaagctcctgcaagtgcggcaacggctgcggaggctgcaagatgtacccagacttgagctacactgagtcaaccaccaccgagaccttggtcatgggagtggcacctgttaaggctcaatttgagggtgctgaaatgggtgtgcccgctgagaacgatggctgcaaatgtggaccaaactgctcctgcaacccctgcacttgcaagtg

SEQ ID NO: 30630 - DNA, 407 bp, Glycine max
  modified_base (228)..(228): a, c, g, t, unknown, or other
gctcacaaatcaagaaaaaagtattccattggaggtgatattaatcaactttttccagctcttggaaattaaaactctttttaaaagcgcaagttcatcacgttacacaaaaaagcgctcttaaagggccaataaaagtcactatatctcacgcatcaaaaattgatatctcagaccctgtaagtttaacgcacgcacttagagggttgtgcatctctcaggcctcanaaatggctgctttgaagagactgactaagccatgcagttcatctatagtatcagaggcgggcaccatcaaaaggttgtacacggcactggtcgatgaggggaaagggaacttggttgaaatttctcttgtgccagacatatctgcaccttctgataaattgtcccgtgtaactatatca

SEQ ID NO: 30631 - DNA, 368 bp, Glycine max
gagagaaaggaggagaaacagcatcggcggtggatgggttgcctccgaggtttctggaaccgttaataatgaacgctcttaaggtcgatctcatcgaaactggtcgcgttgtctgctccatgaagatacctccgcgtttactcaatgctgggaattcgttacacggtggcgccatcgctgctctggtcgacgtggtggggtccgctgcgattcccaccgttggatattcggctcccaatactggggtttctgttgagattaatgtttcgtatttggatgctgcctatgccgatgaggagattgagatcgaggccagggctttgcgtgtaaggaaagctgttgccgttataagcgtggagttcaagaag

SEQ ID NO: 30632 - DNA, 412 bp, Glycine max
ggagaaggaaaggctgaagaagacatagagagagagagagaagtgcagaaaaaatgagactgttcgatccatggcctgttttcttcaagagagaatggaagcggaattggcccttcttggttggattcgccatcaccggaactctcatcaccaaactttcccttggtctctctgaggaggaagccaaaaagtcgaaattcgtccaggcacacaagaggtgactttagaatggaagatttgcagtggctttgcacattgtattagatgtgtgaagagagcttttgtttgtaataaatgaagagagatgttgtatacactccatgttcctatttccattttggttggttactttaatgtgattgagaaattcatactaagcagttctgaatcgatggattcacattatgattag

SEQ ID NO: 30633 - DNA, 338 bp, Glycine max
ggagtgagcaagagtgaagagcgaagagaatggctcccaagggtttaatctttttggctgtgttatgcttctcagtactgtcactgagtcgttgtcttgcggaggataatggacttgttatgaacttctacaaggaatcatgccctcaggctgaagacatcatcaaagaacaagtcaagcttctctacaagcgccacaagaacactgctttctcctggctcagaaacatcttccatgactgtgctgttcagagttgtgatgcttcactgttgctggacttccacagaaggagcttgtctgagaaggaaacagatagaagctttgggttgagaaatttc

SEQ ID NO: 30634 - DNA, 391 bp, Glycine max
ggagagagaaagagatagagaacccgttcttgtttttttccattaacattttcaatctctttcacctaagacacgttcctctttccattcctttcttcctccgtcccattctcgaattggcgtgtgcctcttgctatccctcaaaggtcttttgaagcagaagaatggacttctttactagagacataaatgaggactctatgcttagatgtccattcttgaggaacatcaatgagcctactaacttctcattcttttcacctttggctttaccaatgcctgttcgtggagctaaaggtccaatttttgaagatggtcccaattttgatttggcatttaggcttttccacgggagtgatggtgtagtacccttatctgacagatcttttcg

SEQ ID NO: 30635 - DNA, 392 bp, Glycine max
ggaaggaagaaggggaagaagaggccaatctcacaaacccagaaacgatagagcggaagaggttgaaatccttggccatttcccacaacattctctctgagacacctgcacggagctccgttcagctgaacccttcctccgtcgtggccaagcaccacggcaaagacatcatcaagaagtctcagaggaagagcagcaggtacctcttctccttccccggcttaattgctcccatcgccggtggcaagatcggtgacctcaaggacttgggcaccaaaaaccccgttctctacctcgatttcccccagggtcaaatgaagttattcgggaccattgtatatccaaagaacagatacttgactctacagttccctaaaggtggaaagagtgta

SEQ ID NO: 30636 - DNA, 404 bp, Glycine max
ggatcgcagtgggtatagtagatgaagggaaagggacagcagccagcttcgggactcacggaaccttctaggctatatataaaaaaaaatattgcacgctccttcgggctcctggcatttcaaattcaaggcctctttccaatcttcaaagcagctactgcggcagctccattttccaattgaagttagcagagcaggttgcagtggaattcttagagacagtactttaaattgcagaactttgggggacctatcatggcctctgcttgatttggcatgaagccatctgtgtgtgaaggggacatgatggatgattcccaaaagcatagaatcctgatggtctcagattttttctatcccaactttggaggtgtggagaatcacatatattatctctcacagtg

SEQ ID NO: 30637 - DNA, 408 bp, Glycine max
gcgtgacgattggtgggtggcgccgtacgcctcatcccatccatcgccatcggcaccttccttaaacgacatcgcgtccatcaccccttttctcttcctcacagtcacagcagtggtagcttcccaaaaaagagtgccaatggcatcttcttcagactcatgggcgaaggaatataatgaagcactgaaacttgctgatgatatcagtggcatgatttctgagcagagttcatttcctgcatctggaccagaaacccaacatcattcatctgctataaggagaaagattacaatattggggaccaggcttggtagcttgcagtcccttttgtcaaagcttcccagcaagcagcccatatctgagaaggagatgaatcggcgcaaggacatgctttcaaatttgagatc

SEQ ID NO: 30638 - DNA, 433 bp, Glycine max
aagacgacagaaggggccattgtcatggatgccgatgctacctcagcgttgcacaaaaggggcattgtcccaacaaatgatagcttcaaatatgcttggttcaaggaccatgagagtgtggtaaaagcaatatatactggttctgagtttgttgatactgttaacaccggtgatgatattggtgtagttctggagtctacaagcttctatgctgagcaaggtggtcagatttttgatactggatcacttgagggcccacatgctttatttgaagtgcgtaatgttcaagtttatggaggctttgttcttcacattggtaatgggactgggggctcagttggcgacaaaatattgtgcaaggttgattatggaagacgcgccctttatgcccctaaccatacctgcacacacatggtaaaatttggccttaggg

SEQ ID NO: 30639 - DNA, 331 bp, Glycine max
ggttgtagaaaggaggaaggtttggtcattgttgcagcactctccaactttcttctttgctttctataacttactgggcacatatatagaaatagatagatagtctttgctttcaaagtttacactttgcttcgcgattaatccacgctcctagctcttctaaataccctttctttcttttgcaaccatataataccccgaaaccgttctcttttacatcggtatcgttgtcgcagatggagctagctttgagcttaggcgacacacccaagcccttctctttgcccgcaaaaaatgattctgtgagtttcaaaatagcactgggtgacga

SEQ ID NO: 30640 - DNA, 289 bp, Glycine max
ggcaatcagcagggaaaaggactcaagcccagatgcaaccagttaaactcggaacccaaggctttgaggtactattaactacattacttgctcttattttgatgattgatacaattaatgtgattctatgtttcaaaattgggattcggatgtatgggccttactggagcgtacagcgaccctctccaagaacaggatggcatatctgttatcaaatatgcgttcagaaagggaatcacatttctgatactgcggatgtttatggagccaatgctaatgaacttttggc

SEQ ID NO: 30641 - DNA, 356 bp, Glycine max
  modified_base (250)..(250): a, c, g, t, unknown, or other
ggttccaccattgttttcttgtgagaaaaaagtgtaaactgaagactgaagagagccgcgggaccctattccagccaaatcccaggattgtgaacactgactgaacaaacaccagagacagtatttggggcagcaattttcttttccagattccaaacctattttattttttctatttttcagttcatccttttcaaagttctggtttattgaaaacatttctcacaccgtccaacttcaattcaacaanccgcccttttgcaaatttggttcttttctctttctctgtcaccactttccttcgtcgtaggtcacagcgcgcgcttccgcattacccgcttctctctgcaaatgta

SEQ ID NO: 30642 - DNA, 415 bp, Glycine max
ggaggctgaggatgaagaacttgaaggtgtttggggaggttccctcgggactctcccttgactctaacgaggaaactatagggttttgcagcttcgacatcgaacgcaaccgcatcttcttcctctcttcccacaatctcatttacacttcccatctctcctctttccacgagaacgccgtttggagccctaacgcctcgctctcctcctccgatgctgttaccgtcgatctcgaacccggagacgccgttacctccttcgactacctcatggagaaagaagcgcttcttctcggaacctccaacggccttctcttgctccacaacgtcgacgacgcctccgacgcgacgcaagtcgttggcaagctcgacggcggcgtcaatgcagtttccctcagccctgacggagaactcgt

SEQ ID NO: 30643 - DNA, 391 bp, Glycine max
tgatgtaatgtgatgttttgtgtgtcagtgggtgtgaattttattggtggattcgcattcgcctctggaattcccaaatcatcagtttcagcgaccatggcttccaactccgtccgagttgccgccgctcagatgacatccatcagcgacctcgctgccaatttggccacttgctctcgtctcatcaaagaagcagcatcagctggagccaaattgctttgctttccggaggccttttcttacgtgggtactaaagatggcgacagtgttcgtgttgctgaaccattggatggaccaattatgagccactactgctctttggccagagaatccagcatttggttgtcacttggaggcttccaagaaaaaggatccggtcctcaacgcttgt

SEQ ID NO: 30644 - DNA, 362 bp, Glycine max
gtagtggatgaatactgctttgacttcagggatttatggtctattgtattcccatctgaatcagaaaagattattgcaacagtaacaagaaaatcaaatgaggtagttcatactcaagcaaaagttatgactgatcacgatgtcatgtataagtatgtatcgaagaatgtacttattgtcgcaaatgcagcaccaaaagccataagggaaattggaacagccaccccagaggaggcattgttggtcatctatatcattgatactgtgactggtcgcgtattgcatctcatggcacatcatgggtgccagggtcctgttcatgcttgatttattgaaaacttggttgtctaccaatattttta

SEQ ID NO: 30645 - DNA, 377 bp, Glycine max
  modified_base (366)..(366): a, c, g, t, unknown, or other
ggagacagagagaatgagtacggtgggagaagggaaggtgagtagtaatggtcatggatgttgcaaatcagggccaggctatgcttccccactggaagccatttctggtcccagagagtctctcatttatgtaacctctgtctacacagggaccggaatagagaagccagactatttggcgacagtggatgtggatccaaactctccaacttattccaaagtcatccataggcttcctgttccttatttaggtgacgaattgcatcacacaggctggaattcatgcagctcttgccatggagacccctcagcagaccgacgatttctcatcgtacctgcactcgtatcaagtcgagtatatgtggntgatgtgaaaa

SEQ ID NO: 30646 - DNA, 408 bp, Glycine max
ggagtgagtagtgagaatggagtgtcaagggttaccggaaggttgcattgctagtatactctctcgcactacgccggcggacgtgtgtaggttttccgtcgtatcaaagattttccgttcggccgctgaatcggacgctgtgtggaaacgttttctcccttccgattaccattccatcatttcccagtctccttcgcctctcaactatccttccaagaaggagctctatctcgctctctcggatcgccctatcatcatcgatcagggtaaaaagagctttcaattggagaaaaagagtgggaagaagtgttacatgcttgctgctagagctctcaacattatttggggtgacactgagcaatactggaactggacaaccgataccaattccaggttcccggaagttgc

SEQ ID NO: 30647 - DNA, 392 bp, Glycine max
gaggaaggaaggaatcgcaagtcgttgtgccgcaggtgcagacgacctgtcttcatagccaaacaacctcaaaaacattcaacaacgttcactattaattcatcataaaataaaaacaagtttcgattttttatctttgttttgtttctgatccattcatggaggtgccgagttcctgggatgctcttcgcaaacaggttccaattattctcctccttatcatgctttaatttgccagattctgcttctgattatgttgtaaatgattcaattaatctgggcatgcacaattcgagtgccaaattggtaaaacttcggttttttcttcttctagggtttcttcattttgtcggtgatggggaattcatgggatcaaggatgggattctacta

SEQ ID NO: 30648 - DNA, 211 bp, Glycine max
ggattagggaaggaatttgttgatcttgcattcagaggaagtgtgtcgaaaattggcggattaacttttgatgaggtggcaatagagactttgtctttctgggtgaaggcattctctgaagatacatctaaaaggtttgaaaatttcgtatttatacagttcataccaggaggggagtatcatgcagataacccataaatgtcaaagttgc

SEQ ID NO: 30649 - DNA, 334 bp, Glycine max
ggaagctaaggtcaacaacacatggcagaggatagatagtttgttcgttgcgttgccatgtcggcgtctgagattgttcggtaactggattcgctgaaggacgacaagaccataattgagcacaaaatctctgcgcttgaagctcaactcagagagattaatctccaaaacgactccgcaccacccaacggattgacgcaggacatgactcacagatacagtcgccaccttgtgcttccttcctttggtgctcaagggcaggcaaatctgttgaagtcttcaatcatagttgcgggagctggacggttgggcgctcctgcattgctatactttg

SEQ ID NO: 30650 - DNA, 379 bp, Glycine max
ggagcaagagtgaagagcgaaaagggtggctggcaagggtttaatgcggtttggctgtgttatgcttctcatcactgtcactgagtcgttgtcttgcggaggataatggacttgttatgaacttctacaaggaatcatgccctcaggctgaagacatcatcaaagaacaagtcaagcttctctacaagcgccacaagaacactgctttctcctggctcagaaacatcttccatgacttggctgttcagagttgtgattgcttcactgttgctggactccacaagatagagcttgtctgataaggaaacagatagaagctttgggttgagaaatttcaggtacattgagaccctcaaagaatcctttggaaagggaatgc

SEQ ID NO: 30651 - DNA, 413 bp, Glycine max
ggaatgaatgattttaattgagcggcggggcagaggaaggggcagagttttggagtttgaaagagaaaatattgattgcagttgagttctaatgagtaacgaatacgattacctgttcaagcttctcctaatcggagactcttccgttggaaaatcctgcttgcttctcagattcgctgatgactcctatgtcgacagctacataagtaccattggagttgatttcaaaatcagaacggtggagctggaagggaaaaccgtcaagctgcagatttgggatacagctggacaggagcgattcaggactataacaagcagttattatagaggagcacatggaattattattgtctatgatgttactgagatggaaagctttaacaatgtcaaacagtggttgaatgagattgaca

SEQ ID NO: 30652 - DNA, 255 bp, Glycine max
gtgtgcttgctgctatacaacggcgcgattgggattcacctactggggcgtcaattcttccccttggcaccggaaatgatttgtccagggtacttatctggggaagaggcttctttacacttgatggacaatgcggattgactatgcttttgcatgacattatcattgcagcattttctatgctacatcgcttggaagtaaaaatcgttgaataaagctctgaacgaaaatcaaattaagttgaaaacctaatct

SEQ ID NO: 30653 - DNA, 377 bp, Glycine max
ggtacgaaggaggtgcattggtccgttacctatcgttaatggaaggggaagtagcacttccattttccattttgcatttcccagtagagtaggcaaagccaaatccaaagggaacacgttcattcaattgcaattatttatattaattaataataattcacaaattgtgtgtggccagcactccaatcccctccctcaactacccgacaaattttccattcccggcatctcctcccagcctcgtaccccagataccttaaattcgcttcataacacaatttcgtttctttctttgccgaccaactcgggtctttttttttctttcaccttcacctatggccatggcttctttgattcagtgttctgcaacttccctc

SEQ ID NO: 30654 - DNA, 383 bp, Glycine max
ggttgtcttctgaagagaatttttggttttgtgatcattcatgggtttttttgtagcacatgtagtgcaaggatcagcactagcccttcttggattatggcacaccatccacaccatcagatcttacctggtgaagggccctgccaacttcactgtaagattctggtaccagtttaacactacccctcagtctagacttaaacacttagaacttgtttctattttatccttttccatccttgcatttttcgatcaaattctagacttccctcatttccactatgcctttaagcttgacaactttgagcatgcaactatgttcatacaccttgctttgtttgctggtttctccctctccactgagttgactgattcaattgacc

SEQ ID NO: 30655 - DNA, 401 bp, Glycine max
ggaagcacaagagaagagaagagaagagaggagagggggggagaaggggttgcagagagagagagagagagatgtcatcatcttcagacctggacaggcaaatagagcagttgaagaggtgtgagcctcttaaggagtctgaagtgaaggcgctttgcctcaaagccatggaaatccttgtcgaagagagcaacgttcaaagggtcgacgcccctgtcaccatatgtggtgatattcacggtcagttttatgacatgaaggagcttttcaaagtaagaggggattgccccaaaactaactatttgtttctgggggattttgttgatagagggttttactcgggtgaaacgtttctgcttctgctcgctcttaaagtgaggtatcccgatcggataacactc

SEQ ID NO: 30656 - DNA, 383 bp, Glycine max
  modified_base (358)..(358): a, c, g, t, unknown, or other
agcagtaatttaaccatcaacaataggcaaattacgggagccagtcttttcgtaaatttgccacccaataaagccttttctctgatccttgcgactgatgctaagcttgctaatgcgacatttcgagatgctgaactttgtaggcctggaacacttgatcctgaaaaagtaaaacggaaaatagtgcgttgtattagagatggaaaaataaaatccgttggcgagggtcaggaagctctatctaaaggcgccgtggcaatgcttttgggcaatcaaaagcaaaatgggagaacccttcttgcagagcctcatgttttgtctactgtgaccgacagtaaaagacatgcaagggcacagnctggttacataactgccattgggga

SEQ ID NO: 30657 - DNA, 383 bp, Glycine max
agcagtaatttaaccatcaacaataggcaaattacgggagccagtcttttcgtaaatttgccacccaataaagccttttctctgatccttgcgactgatgctaagcttgctaatgcgacatttcgagatgctgaactttgtaggcctggaacacttgatcctgaaaaagtaaaacggaaaatagtgcgttgtattagagatggaaaaataaaatccgttggcgagggtcaggaagctctatctaaaggcgccgtggcaatgcttttgggcaatcaaaagcaaaatgggagaacccttcttgcagagcctcatgttttggctactgtgaccgacagtaaaggacatgcatgggcacagcctggttacataactgccattgggga

SEQ ID NO: 30658 - DNA, 397 bp, Glycine max
actacaaaatgagtcagttactctgaaatggccaagaaagactggaatttctgaagctgatttctttgaatctgatgactcatggtttgatgctccaccagagggtttcagtttgactttgtcaccttttgcaactatgtggaataccctcttttcatggacaacatcatcttctttggcatatatatatgggagggatgaaagttttcatgaagaatatctatcagttaatggcagagaatatccttgcaaagttgtcttggcagatggtcgctcatctgaaataaaacaaactttagccagttgtcttgctcgagctttacctgcgcttgttgctgtgctccggctgccaataccagtatctatcatggagcaagggatggcatgcttgctggaa

SEQ ID NO: 30659 - DNA, 395 bp, Glycine max
ggttagagtaaagtattaaggaaagagaaagaaaacctcgtttattagcagtagcttgggtgttcttaatgggcgtcctttgggcctcttcaaaggctcctgaccctgtccgtcatatgatagagggactttgagaatttaagcgatcaattatcaacgattgaaggaagagttgagaaatgagtcaaatgtcatctggaattgttggtgttggttatattggcaccaactatatggtcccattattactaccaccaccattttcttccttgagttttaacacctttatcaaacacaagggattggtgttggatagtaatcatacaggaaggagaagaggacatgggattgtggcatctagcaacgttgcttcaccttccatatgggatgattgg

SEQ ID NO: 30660 - DNA, 284 bp, Glycine max
cgtgggagcgaagtgaattgaaatcgaagtgactctacctgagttgactcagcaatggccgaagatgtgactctgttgatggtggcggtgaacgattcgagcattaaggcataccctcatccttctatcagcatcttaggggctttcgactggaccatcaacatgaccgttcgcgacaacgtctctgccttcaaccttgtttgtcttcacgttcaaatacccgaggaacatggtcttgatgacatggatagtatctctgcttctgctgacgataataagaacat

SEQ ID NO: 30661 - DNA, 389 bp, Glycine max
gttgataaaggtcttggtaacccgggtgttggttggtttctggagcatgttcgagatgaatttaaaaagctagctagaaaaggttcaagaggaattttgccaaacatgaattcaatttacattcaggaaaaactggttcctgtcattcgtggtctgatcacttcattggagagtgtttcacatggtggtagtaattggagagatgaaacttccttgtcttttcaagtggatctgtctccatcaccaagtaatttgaatggacaaattgaaggtgctagttcaacaaaagccccattattgggaaaatctaacaagccagataagaagaaagtaaaagatcatgtcattgctatgagagatgttgagttggaggagcatcagaaatctac

SEQ ID NO: 30662 - DNA, 397 bp, Glycine max
  modified_base (321)..(321): a, c, g, t, unknown, or other
ggcaagcagaagaagaagaagtggagcaagggtaagcaaaaggaaaaggtgaataacatggtgctcttcgatcagggtacctatgacaagctcctctctgaggcacccaaatacaagctcattactccttccattctctctgaccgtttgaggattaatggatcacttgcaaggaaggctattagggaattgatggctagaggttcaatcaggatggtgtctgcccatgcaagtcagcagatttacactagagctacaaacacctagatgtactggttataatttatgtagtattgatgcacctctgaagtgaaattttgntttttctgtttgagacgtacctcatgctagattgcatcagttcgacagttgctaaattcatggtttattcccttct

SEQ ID NO: 30663 - DNA, 395 bp, Glycine max
cgtgttggctgcttgagactacagaagggatagtggaaacaacggggaaggtcaaccacttcaaaatctaatttcagaccatatgggatcgactttccattatgaccaactgggagatataccaatggccgaacagaaattgacataatcactcaatttctgggatttgagaaatttatcccaccctttgcaaacactagtggttcatacatacttaaaggtgttaactatgcatcatgtggatctggtatacacaacgaaactggctggcattatggttctgctatcggcttgggattacagttagcaaatcacagagtcatagtatttgaaattgctaccaaacttggaagtcctgacttagctcgacaataccctgaaaaatgcttgtatta

SEQ ID NO: 30664 - DNA, 366 bp, Glycine max
ggtttcataggctcctttgtgattacgaaaatgtggaagagaacgggttttgaagaagaagcagttcaattgatcaactcagatttcagggacctaagtctagctgctaatagactcgcccatcatgccatcaaacttggtggcattggctttggagcctcttttttcggattgtttgctgccattgctgctatttatctgttgattttggatcgtacaaactggaaaacaaatattctcacagcactactcattccatacattttcttcagcttgccttcattaattttcgacgtcttcaggggagagcttggaaaatggattgctgcagttgctgttgtattacgccttttccttccaagacac

SEQ ID NO: 30665 - DNA, 393 bp, Glycine max
ctagagtaaccggggctaagtattcataccagtggatggccttggcccagcagaacaactggcatgtcttactggatgctggatcattgggccccaaggacatggattctcttggcttgtccctatttcggccagattttatagttacatcattttacagggtttttggatatgatcccacaggttttggttgtcttctgatcaagaaatcagtgatgcaaagccttcaaaatcagtctggttgtactgggtctggaatggtgaagattaccccggagtttccaatgtatttgagtgattctgttgatggtttggataaattggttgggattgaagacgatgatgaaatcactgggatgggtgaaaagacttctgaaactcgtcaagggacac

SEQ ID NO: 30666 - DNA, 407 bp, Glycine max
gaggaagagatgagggagaggtacgagatattctcgcaaaacctcaggttcatccgctcccacaacaagaaccgcttgccctacactctctctgttaatcattttgctgattggacttgggaggagttcaaaagacacagactaggcgctgcccaaaattgctctgccactcttaacggcaaccacaagctcactgatgctgttcttcctcccacgaaagactggaggaaagaaggaatagtgagtgatgttaaagatcaaggcagctgcggatcatgctggacattcagcacaactggggctttagaagcagcctatgcacaagcatttgggaagagtatctctctttctgagcagcagctagtggattgtgctggcccgttcaacaactttggctgtaatggtgg

SEQ ID NO: 30667 - DNA, 376 bp, Glycine max
gaacacaaagaagtctaattgatggggtgttgttgcaccaaacagcgagtcgatcataaagatccagcagatcttgcttcccaaacctatgttaatatttctgaaattgaagctctgtatgatctgtacaagaaattaagcagctccatcatccacgactgagatatcagcaaagaagagtttcagcttggcttatttggaagcagcgagaaacggagcctctttgccgacaggggctctcaattatttgactcataaaaatgatggggtgatagaatttggagagttcgttaaagctctcaacgtcttccagccagcagcgccacaagcacaaagagcagattttgcatttcgactctatgatataagtcaaaga

SEQ ID NO: 30668 - DNA, 279 bp, Glycine max
gaagaaaggaagaaacataccgtaggagagcatcaaactctgcttcttcgatttccattgcgaaacgttactttcctaacttctttctcttcatcttcttcgctcttcgatcttcgaccggggactgctcccaataccaccaccaccactcgtcgatggccacgatcggaagcttacacgactcccaaggctctcaaaacagcttcgaaaccgaaaccctcgctcgaatcgccgttgacgaactcatcatgatgcaggattcgcttcttgagtttgcta

SEQ ID NO: 30669 - DNA, 397 bp, Glycine max
ggcgatctgagagtgaagttgaatgcaaagaaaaaatggcgtcgataactggaccacagattctactgcactctggttctccatggttgaaacagacgatgaaaccctcgtcatcaccctttctcctcttcccaaaacacactcctcgtcgcaccttctgctccatcaattccaattccaagggttcgagttccatcgttcccgacctcctccattacctgaaccactcctggacccaattccacgccacagccgaagctaaacgacaattactcgccgccggtttccacatgctcgacgagaaccacgactggcacctcaagcccggcggacgctacttcttcacccgcaacatgtcctgtttggttgctttcgccatcggagataagtacaatgt

SEQ ID NO: 30670 - DNA, 408 bp, Glycine max
ggtgcacaagtgagtttgttgatcgagataactagaaacagtgtgatgaaaatgaaggtccttgttttcttcgttgctacaattttggtagcatggcaatgccatgcgtacgatatgttccctctccgaatgaacactggctatggtgcccgtactccggaggtgaaatgcgcaagttggaggcttgctgtggaagcacacaacatctttggctttgagaccattcctgaagagtgcgttgaagcaacaaaggaatacatccatggcgaacaatatagatcagactccaaaacagttaaccaacaagcttacttttatgccagagacctcgaagtccatcccaaggacacatttgtgttcagtatagatggcaccgtactctctaatattccatactacaaaaaacat

SEQ ID NO: 30671 - DNA, 400 bp, Glycine max
gaggaaaatgagaggaaagagttggcaatcttcacagcacttgctttctctcagaagctgtctggtctcccaccagaaactgtgttccaaccacttcttaaagataaccttgtggccaaagggctagttctgtcatttatgactgactcctttaaggagtatctgattgacaacagccttgatgatcttatttcaattctaaaacggtgaaaagtagaggatgatcttttggacattttcccccctacaaacagatccattgaagctttctctgagcatttcaccaatgaatgattggtggccttggtggagtataatgaatagaatatttttgaggtgaaacttaaggaaatgaaagtcttcgttaacagcactgataacattagaagctgatacattt

SEQ ID NO: 30672 - DNA, 388 bp, Glycine max
ggaagaagaagaagaaaccacgacgcaagtcgaaagtttgattccaaaatgcgatcctcaagcattcgcagcttcaccatcttcaccctctttctcattgcgatcctcccccacggacacgcaacaactccaacctccaaacttcgcctcaaacctctctcttctcccttttcaaccgccctcgaaaccctccagaaacaactcgggtacaccttcaagagcatcgatcttcttcgtcgcgccatgacacacgcttccttctccgaagaaaacaacaaagctttcgccattctcggcgccagcgtcatcgaaacctccgtctctttccatctgctctccagagacgttgatctttcttccaaagagctgaaccgtcgattgtcccaaa

SEQ ID NO: 30673 - DNA, 399 bp, Glycine max
ggctctagaaaattcagtgctgaaacatggcttcggctactctctctgtagccaaaccagcccttcaggcaaatgggaaaggcttctctgaattctctggcctccgaagctcatcaggcttccttcccttttctagaaaatcttcagaggatttccattctgtcattgccttccagacctatgcagttggaagcagtggaggatacaagaagggtgtgacagaagcaaaactgaaggttgccataaacgggtttggaaggattggaaggaacttcttgaggtgctggcacggtcgcaaagactcccctcttgatgtcattgccatcaacgacaccggcggcgtgaaacaagcctctcaccttctcaaatacgattccatcctcggaaccttcgatgctg

SEQ ID NO: 30674 - DNA, 378 bp, Glycine max
  modified_base (323)..(323): a, c, g, t, unknown, or other
ggagacagagagaatgagtacggggggagaagggaaggtgagtagtaatggtcatggatgttgcaaatcagggccaggctatgcttccccactggaagccatttctggtcccagagagtctctcatttatgtaacctctgtctacacagggaccggaatagagaagccagactatttggcgacagtggatgtggatccaaactctccaacttattccaaagtcatccataggcttcctgttccttatttaggtgacgaattgcatcacacaggctggaattcatgcagctcttgccatggagacccctcagcagaccgacganttctcatcgtacctgcactcgtatcaggtcgagtatatgtggttgatgtgaaaac

SEQ ID NO: 30675 - DNA, 364 bp, Glycine max
gaggaaaatgagaggaaaaagttggcaatcttcacagcacttgctttctctcagaagctgtctggtctcccaccagaaactgtgttccaaccacttcttaaagataaccttgtggccaaagggctagttctgtcatttatgactgacttctttaaggagtatctgattgacaacagccttgatgatcttatttcaattctaaaacggggaaaagtagaggaggatcttttggacattttcccccctacaaaaagatccattgaagctttctctgagcatttcaccaaagaaagattggtggccttggtggagtataatgaaaagaaaatttttgaggtgaaacttaaggaaatgaagtcttctt

SEQ ID NO: 30676 - DNA, 334 bp, Glycine max
gcagcaagagtgaaaagcgaacagaatggctcccaagggtgtaatcttattggctgtgctatgcttctcagcactgacactgagtcgctgtcttgcggaagatcatcgacttgttatgaacttctacaaagaatcatgctctcaggctgaagacatcatcgaagaacaagtcaagctgctttacaagcgccacacgaacactgctttctcctggctcagacacatcttccatgactgtgctgttcacagttgagatgcttcactggtgctggactccacatgaaggagcttgtctgataaggtaacagatagaaactttgggttgagaaatttc

SEQ ID NO: 30677 - DNA, 391 bp, Glycine max
ggaagaaggaagcatcataaccggccaaagcttctctctcttccatttatcccccataaataaaactaggtgaaaaaaatatactctgtgcttctcatgatgatagtgtagctgaagctgcttctgctgcagcattggtgatttggacacaaaaaaagtttcaaacttttcagttctctgagcttctggtttatcaattttgaaggagttcaatactttaccctattagttggttccctgaaatttgtattggtattgctgtatcagaaattcttctgaacaatctctttaatcaaccatgtcattattggctaaactacgctgtgtcaccatagatgttactggtaccctaatggcttacaaaggggagctcggtgactattattgcatg

SEQ ID NO: 30678 - DNA, 406 bp, Glycine max
gacggacgagggtttcgtttcgggtttgacgttgttcacaatcactttctgcgcttcactcactcccttcgtgcggttttctttctttgtcgaactcgtgcgaaaatgcgtgagattcttcacatacagggagggcaatgcggaaaccagatcggagcgaagttctgggaggtggtgtgcgcggagcacgggatcgattccacggggaggtaccagggggacaacgagttgcaactcgagcgagtcaacgtctattacaatgaagcgagttgcggaaggttcgtgccgagggcggtgctcatggatctagagccagggaccatggacagcgtcagatctggtccctacggtcagattttccgacctgataacttcgtctttcgccagtccggcgccggaaacaact

SEQ ID NO: 30679 - DNA, 378 bp, Glycine max
gggaaaaagaagtctagtagtagtagtagtaaatcaattttttacgaagctcccctcggatacagcattgaagacgttagaccaaacggtggaatcaagaaattcagatctgctgcttactctaactgttctcgcaaaccatcctgatacacatccggattgatagttcgttgcatgcaaccatagttttattaggattttttcttctttgttttcaattaggtttttttgttgctctccttcaaactccatctttccaaatcctctctttgcgattgtgttttgatctgcttcctactgcgatagtttctctactggtacatggccatggcggtttccgcaattggttttgaaggtttcgagaaaaggttggaaata

SEQ ID NO: 30680 - DNA, 190 bp, Glycine max
ggagaaattcaggggtacgggatattccacatcgaatgggctttgttagatgtgtttagaccagattcaattgtttggagcaaatgctcagaatggtgatggcttattgtccttaggccaacatctgtatgcccaaatgatcttggatcatacttcatgaaattttttgtgaccttatgcaacatttctt

SEQ ID NO: 30681 - DNA, 409 bp, Glycine max
ggtgcaaaggaggaagaggaaaaagaggattggagggtcgccacgtttagcaacaaccaaaccctctctactctttcttcttctcttcgctagggttttagcttcttcctcttcacttcgttcttctggcctctacaatgagcaacgacaaggacaccttcaacgtcgctgatctcacttccgctctcaacgaggacaatagagcagaccttgtcaatgctctcaagagcaagatacagagtttggctggacagcattctgatattctagagtctctgtcgcccaatgtcaggaagcgtgtggaggttcttagagagatccagggtcaacatgatgaattagaggcaaaattttttgaggagagagcagctcttgaggccaaataccaaaaattgtatcaaccacttta

SEQ ID NO: 30682 - DNA, 413 bp, Glycine max; identical to SEQ ID NO: 27396

SEQ ID NO: 30683 - DNA, 204 bp, Glycine max
cgacgggggtgtcgagttcacttaacatatacgagattctggtgtgttgtgtgtgcgtactctctgtttaatttgtgtttgttcgttgcttcgaaactttacagttgaacagagtaatgatgactgaagtcctgcctatgtgtcgcgattgagtgcttcgtgtgcacatggcttgtcggttagaagctgcggccccactggctg

SEQ ID NO: 30684 - DNA, 355 bp, Glycine max
ggatgacagaagggaacggtgacagaactctgggaaagatcgcagacgcattcaatgaccttgcaaacgttttgaccgatttttagaccgcagaaacatacgtcaaagttgatccattctatcatgcctgctctctcgagtccaatctgttcggttgattgggcgtggtcttcaagttcagcgaaatggattacgttgacaagggttatgatctggcagaggcgtacatatctattcaaaatatgcagtctttgattgagctggatgtgcaagctaacactgttaagaaaggatgtagccatacgcggaatctgctcagagtgaagcgcagacttgacatggtcagagtgctctt

SEQ ID NO: 30685 - DNA, 271 bp, Glycine max
cacgggggtacatcgacggactataagaggggccatattatttttcagaacgcggctctataattgatttgtcaccctcttctaacggacgaaacaggtttccatcctacaatgtcgagttcataactctgaatgcactcttgctggactcaaacttgacggactggcggcatttcattcataaactcactcaggactaacatagactattgttaaattacacatctaaacaccaatggaatataactgcacagaggacatgaaacataca

SEQ ID NO: 30686 - DNA, 415 bp, Glycine max
caccgtgaggcgaagatgttcgctaaccctaaccctaacccctctttggatagtggtggcattttctctgagataggaaacttcaccagcctcatcaatttaaacaacaacgaagcgtttgggtttgggaacaataaaaataacaacagcatcctcgatgcgacgtcgtttcgtttcggtattagtgttactaatcaggtgcaggcggcagcaggtggaggccatggtcagtggcagcagcagaatcatcaggagttcggtacggcgtcgtttctcgatcacactgtgccgcttgagttttcttcgctgcagcataagactgggcatcagggagggtttggatcgttggattggcaacccggtgcggatcaaggtttgtttgatcttcctaacaccggtgatcagccttactgga

SEQ ID NO: 30687 - DNA, 422 bp, Glycine max
acagaaggggggacgatgaaagaaaaaataactgattagtctttctattataaaatagagtataggcattatttttttcttctaaaaaaataaaattaagaaattttcatggtaaccattcgtgcagatgaaattagtaaaattatccgtgaacgcattgagcaatataatacggaagtaaaaattgtaaatacgggtaccgtacttcaagtaggcgacggtattgctcgtatttatggtcttgatgaagtaatggcgggtgaattagtggaatttgaagagggtactataggcattgctttgaatttggaatccaaaaatgttggtgttgtattaatgggtgatggtttgatgatacaagaaggaagttcagtaaaagcaacaggaagaattgctcagatacctgtaaatgaggcttattt

SEQ ID NO: 30688 - DNA, 376 bp, Glycine max
ggacacatgaaaggaaacacaaaccagggaaaggaaatttcagtggccgggatcgatcataaggaggaagaaatacaaggttttgggacctcttctcttggcttataaaaagtccaaaacaggagccttcttggtgttttagaaaggaggaggcttgggggaaaagggtggagaaaaaagtggttaaagggacagcaacttattggatactggaggataagaagactattgctacaaggcaaagtaaaccaatgggggaaatatcttctagtgttgcagtaccttttacacttggtgttggaaatttgattcaaaaggagtccgcggtgacgactcacatggagataactgggctgaagctcatggcaaatacagc

SEQ ID NO: 30689 - DNA, 410 bp, Glycine max
ggaagagaagaggaagaagacgaagaagaatccaaaagcaatcccatctgtgtgtttgcacatcagaagggagggctatcaaactcaaagatctaatctaatcaggcttttgggggtgtttcagacattgcatgcatatgggtggttgtgttggatgctataaaaggcctacactgagtgctactgtggatgtgccatcgaaagggttggcaacacaaggtaacggagtgaggaaaccaagttcatcagaggatttttggaccactagcacgcatgatatggacaacagcgctgtccagtcacaggggagcatctcttcagccagtctaacaaaccaagctgtggttcttcatgctggttcttccaaaagcagcaccaaccccactggaattgtaaatcacggtgtaatt

SEQ ID NO: 30690 - DNA, 405 bp, Glycine max
  modified_base (310)..(310): a, c, g, t, unknown, or other
gatgccatcgattgtggaagatctagaacgccgtacctttgtgtacaatcttatcacgccaatcataaatcagtacgtttctgatcttgacgagggcaaggcaatgtatctgtactttgtaaaagcagaaatgtgcactccatgtggcctaccagccagaacagtgttaacaagctactacaagagcaagcacttcaagtgccgcacacacgatccttggaacgactacacaagccctgaccaaaccattctatgcaatgacagcaaccaaagcatgcattgccagcttctctcaggtttggtccaccgncgccacgtcctacgcctcggtgccgtcttcgccttcgcacttctgagagccatttccttcctggaacgaaactggaggcacctttgtgaggacat

SEQ ID NO: 30691 - DNA, 286 bp, Glycine max
caatatcacacataattaatggcaaagtcactcctattgctatagcagtatgatgggtgacactgagatcaaaccatcagttgaagtaatcatatgttcttccatgaacactaacaatagcgcaaacaaccacacccttccaacctacatcacctagtcatcacaatcacacttaccaatcttgatcaagctacatgctggatactttatcaaatgcctttccttttatgcacaaaatttgcatatggaactataggcattgctctgaatttgcaatccaaaaatg

SEQ ID NO: 30692 - DNA, 418 bp, Glycine max
ggagtgagacaatatcacacataatataatgccaaaatcactcctattgctatagcaatatgatgggtgacactgagatcaaaccatcagttgaagtagtcatatgtgcttccatgaacaataacaatagcgcaaacaaccacacccttccaaccgacatcaccaagtcatcacaatcacacttaccaatcttgaccaagctccatgctggttactttttcatatgcctttcctttggtgcacaagctttgctctggaagagtttgagtaaacacaacaaggactcacaaactctctggcatggattcaatttgatgccttccattgcgtttctactactttggtgtgtggcactgctcactgccactactttgtctttactttacgtgctcaagtgcatctttcacttggacatggg

SEQ ID NO: 30693 - DNA, 332 bp, Glycine max
ggagcagaggcagagcataaacgtcgttgggggtttccttacaaaagagagaaagaaataatgagccccatgggtgagagccagcaacggagcttgtttgggagtacaaaggcatcgtctatgccagtgtcaacgtcgcgttcagactctgaaggaggccttagcagacgtctttcttctctgtctctgaagatccaattagagagcccgaattccttctcatggtcattttccagatccaagttcctctcatccatggatgactatgcaaggacatttttggactggagctgggcctggatcctttccaggaagctcattttcgctacaga

SEQ ID NO: 30694 - DNA, 412 bp, Glycine max
ggagcagaggcagagcataaacgttgttgtgtgtttccttagaaaagagagaaagaaataatgagccccatgggtgagagccagcagcggagcttgtttgggagtacaaaggcatcgtctctgccagtgtcaacgtcacgttcagactctgaaggaggccttcgcagacgtctttcttctctgtctctgaagatccaattagagagcccgaattcctgctcatggtcatttcccagatccaagtccctctcatccatgggtgactatgcaaggacatggtgggactggagctgggcctggatcctctccaggaagctcatcttcgctacagatctcgaaatgaacgaccaggataccaagctccttgcttatcataacaagggcacttggagacatgttttctataaactgc

SEQ ID NO: 30695 - DNA, 426 bp, Glycine max
accggttgcaaaagaccaccggaaggggacacacattggtcctagtagtgcctacagactcgatatgatacgccacttgtgagactgtagccttatcactcgcgtgcgacctgcagcaccacagctagctcaagggcgtatccccaacgatcataatgtacggtcactgtgctctaaccatacgctggcacgggtacatgatgatctaaaggcgtcacagcactgaatcagagagctcgactctgataacggtagatgacatgcacgctaaccagcactatgctgtagaagatacagtcgctatcgtgaaacttgaggatattgaggcctccaatgacaactgtgacgatgcttatgatgaaccaactgactgcctcatcattgatatagctcaggatggaccgttcagactccttactgaaaatg

SEQ ID NO: 30696 - DNA, 277 bp, Glycine max
caaaaaaccccactaggggacacacaaatcgcctaattatctccagaggctatatcttatatgcggcgtgtgaagtcctatgccctaacttacaatgctacactttatacaccaattggtaagccaatggcctcatgtgaatcttctactacagtacctactccagccatgaaccctcattatactccaatcctacctatgccttatccatacatgccttgtgctcaaaattttgcttttccacatcggattcaagttcctttaaatcccaaaccta

SEQ ID NO: 30697 - DNA, 143 bp, Glycine max
ggcaaaagttagtagtagtgaagaaaatgaaagtcctggttttctttgttgctatagttctagcagcatggcattgccatggctcagaccatgaccatgaccatggccacacctaccaaattttccctctgagaatgaaaact

SEQ ID NO: 30698 - DNA, 323 bp, Glycine max
ggttctagtgtgtgattgtttgttgttgtaactcgctcttcttcttttgttgttctgtgtttgtgtttgctttttctctcacctgaaaatgtcttgctgcggtggtaactgtggttgcggaagctcctgcaagtgcggcaacggctgcggaggctgcaagatgtacccatacttgagctacactgagtcaaccaccaccgagaccttggtcatgggagtggcacctgttaaggctcaatttgagggtgctgaaatgggggtgcccgctgagaacgatggcttgcaatgtgggaccaaactgctcctgcaacccctggacttgc

SEQ ID NO: 30699 - DNA, 354 bp, Glycine max
ggaacgtggtggacttgcagagaaggtggtcagagacaaagttttggtatttcgttttactgatgttgggaaacttccccctccagttctccagtttgttgaggtgtcatttggttatactcctgataatctcatctacaagaacattgactttggggttgatttagattctcgggttgcgctggttgggcccaatggtgctgggaagagtacactactgaagctaatgacaggtgacttgatgcctagtgatggcatggtccgacgtcataatcatcttcgaattgcacaatatcaccagcatttggccgaaaagctagacatggaaatgtctgctctccagtttattgatta

SEQ ID NO: 30700 - DNA, 118 bp, Glycine max
gtggcaagggacatgatggaggaccttagggatcctctgaaagaaaacacggtgcctgtatgggctgttactttatatgcggttcttatgccaatgggcgttttccttctcttgtata

SEQ ID NO: 30701 - DNA, 403 bp, Glycine max
  modified_base (390)..(390): a, c, g, t, unknown, or other
gacactaaacaagttaaaagaagagcatcagtgaactaacaaagcaaccctatgtcgaaggtggtttgtgtcaccggagccagcggcgccatcggatcatgggtggtcctactcctcctccagcgtggttacaccgtccatgccaccgtccaagatatcaaggatgaaaatgagacgaaacatttggaggaaatggaaggagcaaagagtcatctccatttttttgaaatggatcttcttgacatcgactccattgccgctgccataaagggttgttccggcgtaatccaccttgcatgtcctaacatcattggtcaagtcgaagatcccgagaaacagatattggaaccggcgataaaaggaacggttaatgtgttgaaagcggcgaangaagcaggggtgg

SEQ ID NO: 30702 - DNA, 95 bp, Glycine max
tgggatagcagcatggtacaaagcattggattcaataacttaagttcattccttgtgttttgctttctttctcaaaaccaaacatgtctaacaca

SEQ ID NO: 30703 - DNA, 337 bp, Glycine max
agaagaccacacaaagggacatacatagagtcttcaatctttacccagataaatacataaaaatggttactcttccaattggcattaggaaaaattgtctaacatactttcagtatgaataagtaagggacacaccaagcgaaacatgaaacattcttctgataatcttcactttggttgcagcaatgacatttcaagctgcagtgaatcctcctgttggattttgacaagacgataacgatggacacgtctcatgaagagcaatctatgcttcagatacacattcttactatgtcttcctcatattcaatactttggcattttctaatcccatatt

SEQ ID NO: 30704 - DNA, 344 bp, Glycine max
gagtggcggagtgtgcagaagagcgtcgcagtcgcaaccctaatcagaagaagcgcagcttcaagcgagtgacagccaccagccatgggtcgtatgcacagccgcggtaagggtatatcctcttctgctttgccctacaaaaggacaccttctagctggctcaagatctcttcgcaagatgtcgaagaaaatatctgcaagtttgcgaagaaaggtttgaccccgtctcagattggtgtcattctcagagattctcacggtattgctcaggtcaatagcgtcactggcagaaaaatccttcgcatcctcaaagctaacggacttgcgcctgaaatccagaggac

SEQ ID NO: 30705 - DNA, 151 bp, Glycine max
tctagaatagtttggggcaagagggtgtcatggaatgttactacttgcaaggcctcaacaacaagtgatgtgattgagaagagtgtgactgagaatagggtggtgagtattgaggatgaaaccagtttcacttatgtcatgaagtttggtg

SEQ ID NO: 30706 - DNA, 314 bp, Glycine max
ggaacaaaacaagtgtttcgaatagattatcctaagtctttgggaatagtgctgcaatggcttcaagtcaggaggaggtgacccttttgggagctactggaagcccatttgtgtgcagggttcatattgccctcaagttgaagggagttcaatacaaatatgtcgaagaaaatttgaggaacaagagtgaactgcttctcaaatccaacccagttcacaagaaggttccagtgtttattcacaatgagaagcccatagcagagtctcttgtgattgttgaatacattgatgagacatggaagaacaaccccatc

SEQ ID NO: 30707 - DNA, 367 bp, Glycine max
gaggacgagagtgacaacgaccatgatgacgatgaagggaagcatccacatcaaacaagcccacgtaaatttgatgacttcctcaccaaggtgcacaatgaagctaaccgtagtccaccaaggtcctccggtcacgtgacttcacctgattggcgccactcctcgcagccaaaaccttacaatggcggatatgctgactacggaaccaacaagccaattggaggtgccaataaacatgatggtcctggttatggcaacaacaaggaagggaacaagcctttatatggaggtaacactaagaattttgataaccatgatggttatacaaggtcctggccagaagaacaactttgatcatgcttatgat

SEQ ID NO: 30708 - DNA, 392 bp, Glycine max
ggaagaaagagagagagagagagagagagaggtgtgaagtgggtgaaggtttttgagaagaaagatggaacgaagtggcggaatggtaactgggtcgcatgaaaggaacgaacttgttagagttagacacggctctgatagtaggtctaaacccttgaagaatttgaatggtcagagttgtcaaatatgtggtgataccattggattaacggctactggtgatgtctttgtcgcttgtcatgagtgtggcttcccactttgtcattcttgttacgagtatgagctgaaacatatgagccagtctttgtcccagtgcaagactgcatttacaagtcaccaagagggtgccttaagttgaaggagatgatgatgatgaaaaccatgcttatgat

SEQ ID NO: 30709 - DNA, 424 bp, Glycine max
ggtagtagtggagagaaatcgcgatctggaatagggtttagctgaaagatcgagttgaaatgggtttctttggtaccattttggggtttttgggatttggggttgggatttcgattggtctcgtgtctgggtactttctcttcatctacttccaacccaccaatgttgaggatcctgaaatcaagccattgtcggagcaagagcaagagactctgcaacgaatgtttccagagattcctctttggataaaaaatccggattttgatcggcttgattggctgaacaagtttgtagaatatatgtggccgtatcttgataaggcaatttgtaagacttgcgaaaacattgcaaaacccataattgccgaacagaatcctaaatacaaaattgattctgttgagtttgaaacactcacattggggtc

SEQ ID NO: 30710 - DNA, 371 bp, Glycine max
ggacaccaaattcaatcaaagattgattcaattgaatgggttcagtaatgctcagtggaactgaaaagctcaccctcagaaccctaaccgggaacggtttaggtttcactggttcggatttgcacggtaagaacttcccaagagtgagtttcgctgctaccactagtgctaaagttcccaactttagaagcatagtagtacccaagtgtagcgtctcggcttacaggccaagctcgcagccaaggttcattcagcacagaaaagagaccttttggttctataggtctctctcaattgggtatgaccatgtcattaaccctggccattggaccgaggacatgaaggatgatgcccttgaacccggtgatctc

SEQ ID NO: 30711 - DNA, 422 bp, Glycine max
ggacccgacgatggcgagtgaaaagttggtgctggcagtgatcagggccgcgaggccaaccttccgcaaccaaaacgacaaaatcgcatttgccgttcactcctccttcctcacctccggctatgtcctcaccgctacaggtccccaggccctctccgacaatgcgttttctgacccatccaatgacgaggtatccgttgatcattggaacgagctgaacgatgagtacgcgttcgtttacgcgaatccagaaaagggttcggagaaagtgcttgtcaagtgcctcgtgatgaacgacaaattgctcgttcatgcttttactcaaggatcttcggagcctttgagccttgagattgatgttggggattatgctggagaggatggagtcagcaattattctcagcaggtcaagaatttggata

SEQ ID NO: 30712 - DNA, 357 bp, Glycine max
gaaggcttgattgagattgctggcggatgtcaccggttagagaagcttgtcctatgcaagtgtcctaatatttctgactagactttaattgcagttgctaagaactgtccaaagctggctcgatttatcaatagagtcgtgtcctaacatatggcaatgaaggtctacaagctattgggaagtgtcccaatctaaggtctatctcaatcaaggattgctctggagttggtgatcagggagttgctggtgtgttgtcttcagcttctttagctctaacatacgtgaaacttgagtcgctgaatgtttctgatcactatctaacagcgattgggcattactgcattgcaggtaccgatc

SEQ ID NO: 30713 - DNA, 383 bp, Glycine max
gtggtcaatgagtgaaaaaaagaaagaaagaggtgaggtagaataactaccaaaagtaattagtcaaagtgtcaaaccataattctattttacctgttaatgctacgacttatgggataagagataatgggggcagaaatctttttctatttcagtttttttaatattaattagtacaataatgttgtgaatagaaagcagtactgctataaatttaaattaatgttagtacagttttgaaataagaaagtcgcacctatatcatttagttgacttcaaacgaattttgaatattccaaacaactgcttgtgcttttatcttttttcaatttcatgattgatacattatcaataatttacgtccgtgtttctacttttcaatc

SEQ ID NO: 30714 - DNA, 242 bp, Glycine max
ttattaccatttcctcgacctctttcgacaccatactgatacacacttaataatattatattataaattatccaccaaattacactaacccctttatatatacaacttaatatctttattttatcaatattaaattaaaatcatttgcaaccaatacctctttacatatttcattacaaatattaatttccaccgattatatatacttatccaaaatattcatcatcttaaattcttctttt

SEQ ID NO: 30715 - DNA, 401 bp, Glycine max
  modified_base (372)..(372): a, c, g, t, unknown, or other
gggccaagggaatagtggaaaatcctcgtaactatttgacattcttctgccttggtaatagggaggtgaagaaacaaggagagtacgagcctccagaaagaccagatcctgatacagattatatcagagctcaggaggcccggcgcttcatgatttatgttcatgccaagatgatgatagttgatgatgaatacataatcgttggatctgccaacataaaccagagatcaatggatggtgccagagattctgagattgccatgggtgcttatcaaccatttcatttggctgccaggcagcctgccaggggacagatccatggtttccgcatgtcgttgtggtatgagcaccttggcttgcttcatgactctntcctccaccctgaaaatgaagaatgtatt

SEQ ID NO: 30716 - DNA, 304 bp, Glycine max
ggaagaaagatagagagagagagagagagaggtgtgaaggtggtgaaggtttttgagaagaaagatggaacgaagtggcggaatggtaactgggtcgcatgaaaggaacgaacttgttagagttagacacggctctgatagtaggtctaaacccttgaagaatttgaatggtcagagttgtcaaatatgtggtgataccattggattaacggctactggtgatgtctttgtcgcttgtcatgagtgtggcttcccactttgtcattcttgttacgagtatgagctgaaacatatgagccagtct

SEQ ID NO: 30717 - DNA, 400 bp, Glycine max
ggggcggagaggccattgattggtcggtgcttgcctctttgggaggaggttagaaccaaggtggtgaaggagtggtgtgttaagtacagtgttgcggaagcacctgtggtggaaatacttgagaaacggttcaggaagaattatcaccctgcatggtctgctgcattcatacttgatccactttacttggttaaagatgcaagtggaaagtaccttcctccgttcaattgcttaactcgtgaacaagagaaagatgtagataagttattgacaaggctggcttcgcgagaagaagctcgtgttgtgttgatggagctcatgaagtggagatcagaagggcttgacccactttatgcacaggctgtgcagatgaaacaacgagacccggttaccgggaaga

SEQ ID NO: 30718 - DNA, 361 bp, Glycine max
ggctcagataggccattgattggacagagcttggctctttgtgaggaggataaaaccactgtggtgaatgagtgctgcgataagtacagcattgcagtaccacgtgtactataaatactctataaacatgaacactggatatatcaccctgaatggtctgctgaattgatacttgatccagtttacttggttaacgatgcacatgtaaagttcctagatcatttcaatagattaacttgtgaacacgagagagatctagattagctatcgacatagatgactcttcgagacaaatctccagcagtgttacttgaactcatgatatctagatcatcatggcttgacaaatttatgcacaagc

SEQ ID NO: 30719 - DNA, 96 bp, Glycine max
ttggggtttagagaagccattgattgtacggggctatcctctttgtgaagaagttataaccaaagttattaatgaatgctgtattaagtacagtat

SEQ ID NO: 30720 - DNA, 421 bp, Glycine max
ggtggttatgcagaagaatgtgttggatatcaacagcatcaccagtgttgacgggatcgtcggcaccggcttagacttcttaggcagtgcactcgatacagttacttttttagcctcctccatctccatccaacttattagtgctaccaaggctgatggtgggaaaggaaaagttggaaaggctacaaatttgagaggaaagataacattaccaaccataggagctaaggaagaagcatacgatgctcaatttgattgggacagtgacttcggaattcccggtgcattttatattaagaacttcatgcaaaacgagttctacctcaagtctttaattctcgaagacattcaaaaccatggaaccattcacttcatatgtaactcctgggtttacaattcaaaacactacaagactgatcgc

SEQ ID NO: 30721 - DNA, 392 bp, Glycine max
gtatgggaagattaggaaagggaagtcgaaggaggctgtgaagtttgtggaggatttgattgctgcggagccgaatgaggttgagtggaggctcttgctggcactttgttatgagactatggggcaattgagcaaggctaaaaaattgttcagggaaatcttgaagaagaggcctcttctagttagagctttgcatggtttggctatggcgatgcacaaaaatcatgaaggccctgctgtattcgaaatgctaaataatgctcaagagttagtttctcgtgaaaatagagttactgaggagagaaatataagaatcttaattgcacaaatgcatgttgtccagggtaattttgaggagggcttaaaaagatttcaagaattgattgatcaaa

SEQ ID NO: 30722 - DNA, 403 bp, Glycine max
gacaacattgctatcaagaagcttttcactgctcttaaacccaaggacaatgcagtgatcaatggggattttgaagagggtccatggatgttcaggaacacttcactgggtgtgttgcttcccacaaatttggatgaagaaacttcatcactgccaggttggatagtcgaatccaaccgtgccgtccgttacattgattccgatcactactctgttccacaaggcaggagagccattgagttgctctcaggaaaggaaggaatcatatctcaaatggttgagaccaaaccagacatgctctacagcttgaccttctcattgggtcatgctgatgataagtgcaaggagcctcttgctgttatggcctttgctggggaccaggctcagaacattcactacactc

SEQ ID NO: 30723 - DNA, 425 bp, Glycine max
ggcacaagtgagtttgttgatcgagataactaggaacagtgtgatgaaaatgaaggtccttgttttcttcgttgctacaattttggtagcatggcaatgccatgcgtacgatatgttccctctccgaatgaacactggctatggtgcccgtactccggaggtgaaatgcgcaagttggaggcttgctgtggaagcacacaacatctttggctttgagaccatttctgaagagtgcgttgaagcaacaaaggaatacatccatggcgaacaatatagatcagactccaaaacagttaaccaacaagcttacttttatgccagagaccttgaagtccattccaaggacacatttgtgttcagtatatatggcaccgtactttttaatattccatacttcaaaaaacatggatattgggtggagaaat

SEQ ID NO: 30724 - DNA, 347 bp, Glycine max
ggaaggagaaaggggaagcagaatcagcgtgatggcaagagactgggtggttcgatccttggcgcttcgtcacgcaatgaagaatagggttctcacactctccttcaaccgaattcttccctcactcccatcaaaatcctctctcttagccaccaccgccgccgccactgcctcctctcagctctccctcctcccctccttccaccactctcgctccctctcctccgcctcagctccttccgacgttgtccttgttaattccgaggaagagttcaacaatatccttaccaaagtccgagatgactcgttgcacgcggtcttctatttcactgcggctttggtgtgga

SEQ ID NO: 30725 - DNA, 400 bp, Glycine max
gagagaaagagagagaaagatgtcgaagcgtggtcgtggtggttcggcggggaacaagttccgcatgtcgctgggtcttccagtggcggcgacggtgaactgcgccgacaacacgggggcgaagaacctctacatcatttcggtgaaagggatcaaaggccgtttgaaccgtcttccctcggcctgcgttggcgacatggtgatggccaccgtgaagaagggaaaacccgatctgaggaagaaggtcttgccagctgtcatcgttcgccagcgcaagccatggcgccgaaaggacggcgtctacatgtacttcgaagataatgctggtgttattgtcaatcccaagggagaaatgaaaggttctgctatcactggtcccattggaaaagagtgtgctgat

SEQ ID NO: 30726 - DNA, 313 bp, Glycine max
ggcagtggagagagagtgttagcaccagcaatgtggaagttaatcttcgtgtaccttgcactaattcctcttctctgcacctacttctcgccagagaaaccctcagatcggcgcatcctcgatctgctcgatgacttcgccatcaaatcctgtcactctctcttcttcaactccctcaaatctcgcggcttcgatctccaatttcacctcggcgacgaccccaaaattgcgctccagagatacggccagtacctctacgacgccctaattctcttttcccccaccattgaacgttttggaagatccattgacg

SEQ ID NO: 30727 - DNA, 222 bp, Glycine max
ggcagtcgcgtctgataataaacatacacaatcgcctctctcttctagccctagggcgctcttactgattttctctcttccgattgagagaattgtgaacatgttactgcaagctactgacaaactcattaagcactggaaagttgtcagatgtaataatgttatgataataaggtgcaaagataacggctagactgggactattaaccgtgtcattcgctc

SEQ ID NO: 30728 - DNA, 203 bp, Glycine max
accaaatacctggatggtatgtcactttgtatgatgatgttcttctagaatttggtgcttataatgatcattgggtagtggcaaaaaatgaagaggaagctcataaagaggctatccacatgtataatggaaagcattttcatttaagccaagatcctgacgttcttgatacatggttttcttctgattctgttcccattatc

SEQ ID NO: 30729 - DNA, 330 bp, Glycine max
ggacgaccggcttgcccaatcgactgcgtgtctctctgaattgacacgcttaaagacaaagtcttaaatggctggtccaaggattgcccatgctaccttggctggtactaatgtggttaaagagataataatcggaataacacttgtcttatctgctggttgcgtgtggaagatgcaccactggaatgaacagaggagaaccatgaccttctacgatttactggaaaaggctgagatcagtgttgatgcacaggaacagtgaaaatgttcttgctttagacgactatgcgtctcattcatacgcttgtttgtgcatgctatattcaattg

SEQ ID NO: 30730 - DNA, 405 bp, Glycine max
gatggcaatggggactatgtgaaactgagggcgaacgccgacgacggttctcctccgggtgcggcggcggagctttctccgccgacgctaagagccgccgtgtggtattgggtgaaattggtggtgttgtttctattcctggggtttttggctgtggttgtgctcgtctgggtcggaccctatttcatagacaaggagattattccgattataaattgggagacagagactttcagtactccagtgttaactgttttggtgtttgcatctgtggcaatattcccaaccctacttttgccatctacaccttccatgtgggtggctggaatgacatttggttatggctttgggttcttgctaattatatctgcagcagctattggtgtatcactcccttttgtcatc

SEQ ID NO: 30731 - DNA, 407 bp, Glycine max
ggtgcacaagtgagtttgttgatcgagataactagaaacagtgtgatgaaaatgaaggtccttgttttcttcgttgctacaattttggtagcatggcaatgccatgcgtacgatatgttccctctccgaatgaacactggctatggtgcccgtactccggaggtgaaatgcgcaagttggaggcttgctgtggaagcacacaacatctttggctttgagaccattcctgaagagtgcgttgaagcaacaaaggaatacatccatggcgaacaatatagatcagactccaaaacagttaaccaacaagcttacttttatgccagagaccttcaagtccattccaaggacacatttgggttcagtatagatggcaccgtactctctaataattcatactacaaaaaaca

SEQ ID NO: 30732 - DNA, 365 bp, Glycine max
ggggccgaaccgcgagcaatgatttgttggtgtgagagagagggagggcgaactaaagattcgattttggggtgaagcgaagcgaagccatgagacgaaaccattcgaactccggcaattatcggaatccatgtttaaccatgcaccagccttgggcttctctcctcgtttacgggatcaagcgcgtcgagggcaggtcatggcccgctccaatcacaggtcgtctttggattcattctgccagtaaagtcccggaggagtctacaatcaaagcaatggaatacttctacaaggagatttatgcactcaatggcatcagtgatatccaatttcctcaacactaccctgtctctaggcttttgggc

SEQ ID NO: 30733 - DNA, 355 bp, Glycine max
  modified_base (291)..(291): a, c, g, t, unknown, or other
ggagcaggggagttcaaagaagttgttttccaggccacacgcgtagcctacagtgctacaggtatagtgtctctcttgtctggtcaacccaaaggagaagtttcggttgaagcccggtcagagtcaaaaggctattttgaggaaactgtgacagattcatctggaaattatcgtctgagaggactactgcctgatactgactatgttgttaaagtggctaaaagggatgtgggcagttctaatatagagcgtgcatctccagattctattgctgtcaaggttggaactgangatatcaagggatcggattgtatagtttttgaggagccggaaatgacaattataagttgccacg

SEQ ID NO: 30734 - DNA, 381 bp, Glycine max
cgccaccggagggggccgcaccggaaccaagcatggaacagtgagagatatggttctgtctaacgagtctacgctgaactttgtgctttcttgaagatgtcgttactcttcgatcttatcaaccttaacctatccgacatcaccgataaggagatcgccgagtacatatggtctgctggatctcgcatggatatgcggagcagagcacggactgtctggtgactgcataatgacccttacaagctattcaagcggaactatgatggttgcagctctggtcaagcttctggacaagatcttgaaggggacttatgtccacaatcaatttttcgggatccattttcgaggggtctacactgttctggatatgtttgatgctta

SEQ ID NO: 30735 - DNA, 426 bp, Glycine max
ggtccacccgttcgttagatctaacaaccacttatcccctttctccttctaacgagtgaggaaaaatggcgcgtaagaagatcagagagtatgactcaaagaggttgttgaaggagcactttacgagactctctggcaaggagttgccgatcaagtctgcacaaattaccgcatcaactgatttcactgagctacaagagaaggaaccctggctttcatcttctaaattggttgttaaacctgacatgttatttggaaagcgtggcaaaagtggtttggttgccttgaatttggattttgcacaagttgtttcatttgtgaaggagcgtcttggaaaagaggttgagatgagtggatgcaaaggacccataacaactttcattgttgaacctttcatgccacacaatgaagaagtttacctttaca

SEQ ID NO: 30736 - DNA, 288 bp, Glycine max
ggtacaccgaatcgaaggaaccaaccgtcattgagataattatttctgacacaattgtgtgtctattcatgcttcggatggcaatgttgtggcatttctatcacataatcaatgagtatagaactcgatgcttactcaatgctgtgcgtatggatgcacttcaatgcatgggctgtatgagcagattaccttactatccgagtgtgacaatcatgttacaggtgatgcacctatcaaatcgagccattcagactgcttgcatcgtcaagaatcatggaatcatcatga

SEQ ID NO: 30737 - DNA, 426 bp, Glycine max
gggggcctgaacaatgctgtcaatagtccagtcaggcctggcgcttacttgggatctggaagtgggacttttggtgtttcaattggaaatgctggcaccaattggggtccatcagttccaacccagggtggaggggctgcctctgggtatagtacttggggctcttatgaaggtggagataacagcattggtttaggaggtggagggtatggaaggaacagcagcccaagtgtgcctcaatcctcaacatttactgcaccaactggtgattatgaaggatcctatggggacttgtaccgcaatggttcagtttacagtgactcaactttgcggtctgctgcttctgagatagatgcttctggttcgtttggttatggtggacttggtggtatagcttcagatgatctagttaagagttctgagggt

SEQ ID NO: 30738 - DNA, 421 bp, Glycine max
aaggaaagacagtggagtctgcaaacatgatcaactgaataatgcttacccaaatggagctttgctgccaccttcagctagttgttccttgtcattatccatgacgatgggtaacaagcgtgcagttatatgtggagttacatacgggaaaaggaaattcaagctagaaggaaccattaatgatgttaataacatgaaaaatctacttcttgataactttaaattcccaattgggtgcatacgtgtccttacagaagaacagaaggatcccaatttaattccaacaaagaagaacatactggattccttaaattggctcgtgaaagactgccagtcagaggactcattagtcttctacttctcaagacatggtttgcaacaaccagaagatcgcataggagatgaaattgaccggcttgat

SEQ ID NO: 30739 - DNA, 406 bp, Glycine max
ggaatgaccaagaacaacatgaattttctagccttcgttactgttctactcttcatactaccagcaacctcatcttcccagtatttggggaacaaccttctcactcatcgcaagatattcctaaaaaaagacaacattattacctcgtacgctgtcatctttgacggtggtagcacaggaacccgtgtgcatgccttccattttgaccagaatttggatctccttcccattggtgatagtcttgagcttaataaaaagatcacacccggtttaagtgcttacgaggatgatcccgagcaagctgcagaatctctgattccacttttggaggaagcagaaagtgtagttcctgaggacttgcgtcccaacacacccgttaggctaggggcaactgcaggcttaaagc

SEQ ID NO: 30740 - DNA, 373 bp, Glycine max
ccatacaacattgaagaaaccctcacctcctttggcggctctcaatttttcgaaccccaaaccctagtttcatttcgatttcttctctaataattacactcacacatagtttcacgcgtagtgttatcattcatgaacgtattgtttgaaagaagttaagtaaagagagagtagtgggttgtggctcggtggagaaagtagtaaagtaatggaggaatcgttagggcagaaatggaagcagcgagagttcgctttggcatcagtttccgacctctcttcggctccttcttcggcttcgccgggaattgctcgcttcgactctgacggtctccaaattcatcatcaatcttaccagattccattcaatgtcgat

SEQ ID NO: 30741 - DNA, 386 bp, Glycine max
ggatgaaagaaatataaatagaagcagcagcgggatttggtaaagctagaaattgcaatgaagaagaggagcagcagcagcagcagcagttcagtttttgaggcgaatggagtggaggaacctcaacaaccttcatcctgtgcagcagcagcacttgatgagttgcataaagagaaaaatgagaatggagaagaaaccctcgtgccttccaatccctatcccaatcttgacgatggcttctatgaaatcgaaaccatacgccgtaagaggctacgcaagggtcagctccagtacctaatcaaatggcgtggatggcctgagactgccaacacttgggaacctcttgaaaatctacagtccgttcctgatctcggtgatgcttttga

SEQ ID NO: 30742 - DNA, 288 bp, Glycine max
ggttcaccggatcgaaggatctaacagtgagagggatagttttttctaacaacgggtcgcgtaaattggtgcttcagaggagaaggctgtactattccatatggttattcaatgagtattggactcgactctttatcatggaggtgcctatgtatggtctgcaggatatcggattcattggcagagctagattacggactgtctgatacaatcatatatccccttatgagctatgtcaaaccgagctattcaggctgcatgcatggtcaaggttctgggcaatgattt

SEQ ID NO: 30743 - DNA, 160 bp, Glycine max
gcttcaccgaatccaaggatctaacagtgatagggataattttttctacctacagtattcgtaaattggtgcttcggatgagaatgctgacacattcccatatgttacatcaacgattataggactccatgcttaatcatacatcagcctatgtattctc

SEQ ID NO: 30744 - DNA, 341 bp, Glycine max
acgcgtgagcagatgtgagaagacgacacagaggggactcgataatgtgatcgcaagggacagtggtttaggcaaagcaaccagacttgctgttgaggcatggggtctgaagaattgcacccaaaaggaatagtggtacagtgacactgtgactgctgttcttgttcctgcttacattgatagtactgaaatagttaggagggcatggaagagatacaattggagcttaagtattggactgaacaaagatgctgtgaaggttttaagaattggacatatctgccacttgaatgagttgcaactgttacgatgtctagctggtgtacagatgatactcaaag

SEQ ID NO: 30745 - DNA, 385 bp, Glycine max
ccccaagagaatgagatataaaattcctagaaggaaaagggaaaggaactgagagagtaaagacaaaaatggaatccacacacgtaatagccattacaaatggagaagagaatatgattcgttcatcaaaagagaataaaacattccaatttcaacttccacccattatttcccatcttgggaaaaatgaagtccactgtgtctccattacttcttccaatcccagacacaagcaggtgcaaagtggtggccatgacacgaggaagataatccactgcatcaaaatgggaatctccttggttttggtttcactcctatacctcttgaaccctctctttaagcaagttggagaaaatgcaatgtgggctatcatgacagttgtagt

SEQ ID NO: 30746 - DNA, 215 bp, Glycine max
gctactgagaatgaattatgatggaagtgaatcgggaagttagtaaggctgaaactgtttgcatgatgatggggatgatcacgatgaactacatgcaggcactgatgcgaatgaggatcaggcctaagatgatgatgaagatgcttacactgaggtggaccaggttgaagctgcattggatgaccatgctactgctggggcttcattacatgatg

SEQ ID NO: 30747 - DNA, 180 bp, Glycine max
gaggacatccgacagtgacgaatccctgatctactttggcggcgctcaattattagaacggctgacactagtgccatctcgaattcgaccataatgattacactcacacatacatgcacgcgtctgggcataatccacgaacgaattgcatgcactaaggtgaaatgcgatagagccaag

SEQ ID NO: 30748 - DNA, 400 bp, Glycine max
gccacagaaattcaatactaaacacaacagatcggagagagagtgtgtgaaaagtggaacacacaacagaacatcaatggcgacacttaatgctcctcagcctcttacccccgtatgcagatgattgtgagcagattctaaaagccttctcaggttggtgaactaacgaggagctgattgtatcgatcttgcctcatatgaatgctgctcacaggaagcttatcagataaacttatgcccagacctatggagaagatctcctcaaggccttggacaaagaactcacgagtgattttgataggctggatcatcattggacacttgattctgctgaacgtgatgcatttatggcaaacgaggcgactaaaaaacggactttaagcaatcagggtctggtgga

SEQ ID NO: 30749 - DNA, 359 bp, Glycine max
gcttcaaaaatccattcctaatcaaacggaacggtaaaattatgtgtggaaaggggaaccaaaatcctaaccaccatggccaccattaaaggttcttaacctttttcccccgttgcatattattgttaacaatttcctaaagcctttttaagtttggggaattaccaagatgctattggatttaaccttgcttattataattcctcttaaaagaatcctattcataaaacctattccccaaactattgttaagaacttcttaatggccttgacaaagtacctaactatgaatttttcaaggttgttaatttttgaccccttattcctgttaaccgtataccattttttggcaaactagg

SEQ ID NO: 30750 - DNA, 69 bp, Glycine max
gcttcaccgattcaaatgatctaacagtgattgggataattatttctataaacttgattctataaattt

SEQ ID NO: 30751 - DNA, 285 bp, Glycine max
gattaagaggtcattcaaatacgcctgggtgcgggacaagcttgaggctgaacgtgagagaggaattaccattgatattgcattatggaagtttgagaccaccaaatactactgcactgttattgatgctccatgacatcgtgatttcatcaagatcatgattactggaacttcccaggcttgattgtgctgtccttatcattgatttcacaactggttgatctgaagctggtatttccaaagatggtcagactttcgagcatgctctacttgctctttactctt

SEQ ID NO: 30752 - DNA, 336 bp, Glycine max
ggagtataaaattgcaatccctgggattggaaatggcagcggcaggttgcccgaagcttctggaattgagcacgaagatcgtcgctgttggcaaaaactacgctgctcatgccaaagaactaggcaacgccgttcccaaggagccggtgttgtttctgaaaccgacgtcggcttacttgactaacggcggtaccattcatatcccacacaacgagggctctctgcatcacgaggttgacctcgctgtggtcatctccaagaaagcccgtgacgtctacgaatcctgtgccatggattacctcgtcggttatgcactggctctggatatgactgcta

SEQ ID NO: 30753 - DNA, 279 bp, Glycine max
ggatcttttgttggttattgggaaacgggttgtgacggatccttcaagggaagaaagtgggtgctcgagtggtgtggagtgcattctttgcattctaagggcccttaagatggggtcctgcttctgtgtggaaaagcacgagccctccctgcaatataccaaattcatcatgtttcaggaagagaaagagcctcttccagaaaaggctttgatcaaaagactctttatttgagtattggaggaatgagcctccttttatgatccctgtgaggatctttc

SEQ ID NO: 30754 - DNA, 335 bp, Glycine max
gtttatagctatggtgatgtggtgttggaaatccttacaactagactaccagttgatgaggactttggtgaaggtgtagatttggtgaaatgggttcacagtgctccggtaagaggggaaactccagagcagatattggatgctaagcttagcacagtttcctttggttggaggaaagaaatgcttgccgctttgaagggcgcgttgctgtgcactgacaacacaccagccaaacgaccaaaaatgaagaatgtcgtggaaatgcttcgagagataaaagaaaatcgagaacagttagccacttaagtattctattctgtgctgtaatctactcc

SEQ ID NO: 30755 - DNA, 300 bp, Glycine max
aggaccacagaaattgactactaatctctggagatcggcgagatagtgtgactaacatggctcacacgacagtcatctatagtcgacacataaatgcttctcaagccttttatacctgctcgagactattctgagcatattattaaagcctactcactgaggtggacttactagttgccaactgggttaatcttgcctcatatgagtgctcatcagaggaagctgatcagatgaccttatgctctcacgtatggatcatatcttgctgaggactctgtccatgaacttacttaatatttt

SEQ ID NO: 30756 - DNA, 279 bp, Glycine max
ggctgttcaatgtggtcacgtctgtggggattattcttgtcaataaggccttgatggctacatatggttttagttttgctacaactttaactggtctccattttgccacgacaaccttgttgacactcattcttaaatcgttgggatatatccagacctctcatcttccattatctgatataatcaaatttgtcttgtttgcaaatttctccattgttgggatgaatgtgagtttaatgtggaactctgttggtttctatcagattgctaagctgagca

SEQ ID NO: 30757 - DNA, 400 bp, Glycine max
ggaggaaaaggaaaggaaaggggagccaaagcgaaaccctaaccctaacggagagatggcggagcacttggcatcgatattcgggacggagaaggacagggtgaactgtccgttctacttcaagatcggcgcgtgcaggcacggcgaccggtgctcccggcttcacacgaagcccacaattagcccaacgttggttctgtcgaacatgtaccagaggcccgacatgaacatgaacatcatcaccaaccccgatcagccccagccccaatctctcgaccccgataaggtccaggatcacttcgacgacttctacgaagatctctttgaagagcttagcaagtacggccccattcagagcttgaatatttgcgacaaccttgccgatcataagggtggaaat

SEQ ID NO: 30758 - DNA, 367 bp, Glycine max
gacgaggacgatgaagacgaggaggagttgaagaagaggccctttgggttctctcgctccagcaacaaggctgcttctaagcctctctctcgtggatcagcaactgtggaatcaaaggggcaagctgagaagtgtgccaagagaaagaggaagaaccagtatcgtggaatccgtcagcgtccatggggaaagtgggctgctgagatccgtgacccaagaaagggggttcgtgtttggcttggaactttcagcactgctgaagaagctgcaagagcttatgatgctgaagcaaggaggatccggggcaagaaagccaaggtgaatttcccggatgagccttcaagcgctgctgcttcctcaaaacgcc

SEQ ID NO: 30759 - DNA, 316 bp, Glycine max
gggcatgaggtagagcagaggaatggcgcgacgggaaaggggatataacggggaagtggcactggcgaatgataatgagtgtcgaaaagaaagtccatggccatgagtgtgggcgtggcattgccatacaccaccaccagtctcagtttacttcgctaccgctctcgctctccaattcaaaataaaatccgttttccccgtcaaattgtttctaaattaaacagtgcagaggttcaggttcaaacctgggaattttgctttctgaatcacgtaattgtatttatattcttctgttttttgaaacagcttcaggcct

SEQ ID NO: 30760 - DNA, 221 bp, Glycine max
gtcacaagtgagttatttggtggaaatatcgagaaacagtgtgttgaaaatgaatgtccttgttttcttcggtgctacaatttttgtagcatttcattaccatgctttcaattttttcccttttcaaatgaacactgtctatacttcccttactacaaatgtaaaatgctcaagttgtaggctttctacataagcacacaacatctttgacttttatacca

SEQ ID NO: 30761 - DNA, 383 bp, Glycine max
gacactaaacaagttaaaaggggagcatcagtgaactaacaaagcaaccctatgtctaaggtggtttgtgtcaccggagccagcggcgccatcggatcatgggtggtcctactcctcctccagcgtggttacaccgtccatgccaccgtccaagatatcaaggatgaaaatgagacgaaacatttggaggaaatggaaggagcaaagagtcatctccatttttttgaaatggatcttcttgacatcgactccattgccgctgccataaagggttgttccggcgtaatccaccttgcatgtcctaacatcattggtcaagtcgaagatcccgagaaacagatattggaaccggcgataaaaggaacggttaatgtgttgaaggc

SEQ ID NO: 30762 - DNA, 358 bp, Glycine max
gatgacgagtgtgacagaatagactaattctttgagaaatggaattctagaagcatactcagggatcttccaagggtttaaaggttccccaaagacccaacttctgatgccatatgctcctcatgtgctggaaaacttggataagtttgataatgagaaggacatcgatgatgatgtgactaatacaacagttgtcgtgcttctagatatatcagctcatactgtgggtactaacgctcccccgttgattcatcaatctgcgtccaacacagacttacttaaagagtgtttatcatctgatgatcatttgattaaggaatctgcggaatgggccaagttggcaatcagtcgagcattt

SEQ ID NO: 30763 - DNA, 387 bp, Glycine max
gtcattagaattaatgcttactgactttattgtggccattgattctggcgttcctcgtcgaccccctgctggaaaacgtgcagatgaccaggttaattatcctaagttggtcgagttactactcaatagctcagagttttcctctaacctgttacatgatataaccggagggagactaggattccctcatccagaagacacaaatacaatcattgatgttcatactactgatgtaacatcagtagttcatgcgttccgtagtggttttcgtgctgctcttagggatctgcagggattccacatattcctactcacactgcatcaaaaacttgataatttgttaagatcatttatgaatactataggcaaaatatcatcaagggagtc

SEQ ID NO: 30764 - DNA, 359 bp, Glycine max
agagtggtggagtgtgcaaaagagcgtcgtagtggcaacgggtaatcagaagaagcgcagcttcaagcgagtgacagccaccagccatgggtcgtatgcacagccgcggtaagggtatatcctcttctgctttgccctacaaaaggacacctgctagctggctcaagatctcttcgcaagatgtcgaagaaaatatctgcaagtttgcgaagaaaggtttgaccccgtctcagattggtgtcattctcagagattctcacggtattgctcaagtcaatagcgtcactggcagcaaaatccttcgcatcctcaaagctcacggacttgcgcctgaaatttcagaagaccctgaccatttg

SEQ ID NO: 30765 - DNA, 367 bp, Glycine max
gacctaaaaatggcatcaaaactgaccctgattaggttggttgttgcggccctgtgcgccgttgatctaacccagagagcatcatcatcatcatcatcccctcacgcgccagcgccctccgtggactgctccaacctggttctcaccatggccgattgcttgtccttcgtcaccaacggcagcaccatcacaaagccagagggcacatgctgctctggtttgaagtctgttctcaaaaccgctccagcgtgtctctgcgaggctttcaagagcagcgctcaattctgcgtcgttttgaatgtcaccaaggcaaccactcttcctgctgacttcaaagtctctgcttcttttgccaccaactgtggat

SEQ ID NO: 30766 - DNA, 268 bp, Glycine max
ggacccaaaaggttgtcacgaataaggcgatggggttctatgatggggacccgataacaggtaacataaccaattggaccacaccttaatctaggcttgctgatgacacgactaacattatgcctcctactggttgatacttgagcatcaacaaatacactttaatgctcaataactgatttcttgatccgaatctacgagagcagctacattcataggtcacacatatatcatgaaaccgatgaaccaatggattacatgactgaat

SEQ ID NO: 30767 - DNA, 254 bp, Glycine max
ggctgtaaaatgtagtcacgtctgtgggaattaggctagtcaataaagccttgatggctacatatggatttaattttgctacatgctttaactgcactacatcattccacaacaaccttgttgacacttactcttaaatcaatctcatatatccatacctctcatctaccattatctgatatcatcaaatttgtctcgtttgcatatttcttcattgttgttattaatgtgattttaatgttgaactcttacat

SEQ ID NO: 30768 - DNA, 373 bp, Glycine max
gtcattagaattaatgcttactgactggattggggccattgattctggcgttcctcgtcgaccccctgctggaaaacgtgcagatgaccaggttaattatcctaagttggtcgagttactactcaatagctcagagttttcctctaacctgttacatgatataaccggagggagactaggattccctcatccagaagacacaaatacaatcattgatgttcatactactgatgtaacatcagtagttcatgcgttccgtagtggttttcgtgctgctcttagggatctgcaaggattccacatattcctactcacactgcatcaaaaacttgataatttgttaagatcatttattgaatctataggcaaaata

SEQ ID NO: 30769 - DNA, 334 bp, Glycine max
gtcagacgaaggaagtaaggaagctagtctatatattttaaatttgtgatcatcttcattaatatttcattccatggcttcttgtcactcgtctcccactctagtgtttacagtacgaaggaggcaagcggagctaatagcgccggctaagccgacgcctcgtgaagttaagaaactatcggacattgatgaccaagaagggcttcgtttccaaatccccttcatacaattctatggtaataataaagagtcctccatgaaagaccctgttgaagtgataagaaaggcacttacaaaaactctagtattttactacccctttgcgggtaggctt

SEQ ID NO: 30770 - DNA, 385 bp, Glycine max
ggagaaaaaaaataaaataaaaaataaggggaatgaatctggtggcctggtggggagtggggactccgcgatcctcgacagtacaatttcaccgagttcccatcagcagtgcgaaggggagtcccatggctgaccccaagcgagtagttgtctgcggcggcggagtcatcggagtctccaccgcctactttctggcggagaagggcgccgacgtcacgctcatcgagaagtccgacgtggcatgcgccgcgtccggaaaagccggtggattcctcgccctcgattggtgcgacggaggaccgctggaagagctagctcgcacgagcttcaatctccaccgttcgctctccgaagaactggacggtccgcgatcgtacgggtacag

SEQ ID NO: 30771 - DNA, 412 bp, Glycine max
ggggggagtgaaattagaattcctagatgcttggagagtgagctcaccgagctgcatcttagccttttgctccttcaggatgttgagttaaaaacagccgggattataggttgtgcaagattacacctgtgaggagtttgtatgaacataggcaacataaggtcaatattaccttattagcatccctagaaaagggaaataaggaaaaacggaagtgaactgcaccaaccgatcattatggcaaagaggtcccaaagattccctgtgaattatgagaaagatcagtcaggatgtatgtggggttttattagtatatttgattttcgtcatgcccgctttactcggaagttgatcgcggataggaggcatggcagcaagcatgctgttgctgctgcacttaccaagaacaagt

SEQ ID NO: 30772 - DNA, 352 bp, Glycine max
ggtggcgtgggtagataaagagtgtatctggattctgatctgaatatattggcacgcataaaagggaacgaacgtaatggctgcagcagcgttgctcgaacttgatcgagttctcaagtccaagaaggaaatgttgacgcctcgggaagcaaatattcttctatcgtggaaatctaaatctctgatggatctcgctgccggtgcacttggtgggaccgcagctgcaggggctgcaacttggaaactcaatggactatttcgaatatgcctttcagcaggatttggtacttactgtggaccgtggatgtttaatagatcctcgtattctcatgcggatcagattcttacaatg

SEQ ID NO: 30773 - DNA, 381 bp, Glycine max
gacgttccagtggacattatgcgcttgttacgcaacaaccacttagaggaagggccaagcagggaggacaacgggtaggcgaaatggaggtttgggccttggaaggatttggtgttgctcatattttacaagagatgcttacttataaatctgatcatattaaaactcgccaagaagtactcgggactacgatcattggaggaacaatacctaaacctacagatgctccagaatcttttagattgctagttcgagaattacgatctttagctatggaactgaatcatttccttgtatccgagaagaacttccggattcataggaaggaagcttaattggactgaatcagaaattttattctatgattgatcagtattaaca

SEQ ID NO: 30774 - DNA, 327 bp, Glycine max
ggagtaagggcggtgcagtgcttcaaaccccgttttcggttctcatttcctttcatcactctcttgcttcttttcttcttctcgcaattttccattttcacacttttagcaacatcttttaatggcgtcccaaatccgtgagtggtctggaatcaatacattcgcacctgctacccagactaagttgcttgaactcttgggaaatcttaaacaagagaatgtgaactccttgactatacttgtgatgggaaaaggaggtgttggaaaatcttcaactgtgaactccatcattggggaaagagtggtttcgattaatcctttccagtc

SEQ ID NO: 30775 - DNA, 389 bp, Glycine max
tcggacaggtcatcgaaggattgaacgttggggaggacatcgagaaggtcggatccagctccggcaggacctccaagcccgttgtcatcgccaactgcggtcaactctcttagacgacgttgacccgcggctttaatctctgaatctgtgttatttctttcggtgtcgtttttgccttttttttctcttcttttctttctcgtgtcgtcgtttaggggattgtggtgttaaggatatcatttcgaaacccttcccctttccttttcaatatcagtatcatgtggttggttggttggggttcatagagtgagtgaatggagtctgttatgagaagcataaaaaaaacatgaagagctaccctcaataaaaattagacatctataattcac

SEQ ID NO: 30776 - DNA, 395 bp, Glycine max
gatattgacattgggaaatatgttgctggtggtattgttgtttttaatctggatacaaaacaagttaaatggactgcagaacttgatctgagtacagatacttcaaatttccgagcctacatatattcttccccaactgtcgtagatttggatggtgacgggaatcttgacattcttgttggaacttcgtatggcctgttttatgtgttggatcatcatggtaaggttagacaaaagtttcctcttgaaatggctgagattcaaggagctgttgttgcggctgatgttaatgatgacgggaaaattgaactagttacagctgatacacatggaaatgttgctgtatggactccaaaaggagatttaatatgggaaaaacatctaaagagtcttat

SEQ ID NO: 30777 - DNA, 130 bp, Glycine max
cattgggaaatatattgggtatgggaattttgtttatggggctggatacaaaacacatcaaatcaacttcataactataactgagtacagatactctaaatttactagcctacttatattcttccccaac

SEQ ID NO: 30778 - DNA, 364 bp, Glycine max
gtcggcgaggaggttatcggatgtggtgctgggctgcgtgatgcggtacatacacgactccaaggaccgcgacgccgtgtcgcaggtgtgcaggcggtggtacgagctcgactcgctcactcgtaaacacgtcactattgcgctgtgttacaccaccacgccggaccggctaaggcggcggttcccgcacctggagtcgctgaagctgaagggaaagccgcgggcggcgatgttcaacctgatacctgaggattggggaggtttcgtcacgccttgggtcagagtgatctctcaatactttgattgcttgaagtcgcttcactttcggcgcatgattgtgagggattccgatcttcaagttcta

SEQ ID NO: 30779 - DNA, 401 bp, Glycine max
aggtctatgcacaatgcagatgcaaattcaattcttgctgccaaagccaaaacaaaactgagtcatttctttgcttaggagatcggttctgcaaaaagccaaaaagaagaagaagaataaatggaagcagagacctcaaacggtggtggtattggaggcctttacgtcaaagttatgaccgacgaccaaatggaactgctcaggcaacagatttctgtctacgccaccatctgtgaacagctcgttgagatgcacaaggccgtcactacccaacaggaccttgcatggctgaggctgtgtaattagtactgtgatccgttgatggcatgctctggacacaagataactgcgaggcagcgctggactccaacgcctctgcagcttcaaatacttgagcgtat

SEQ ID NO: 30780 - DNA, 362 bp, Glycine max
ggttagggcgtgagaaaaacaaaagagtagtgggctttaggtggtgaagaacaagagctcaaatcaaatcgaatcgaaaaaagaaagaaagatcatattcatggcgatggcaagcctggctcgacggaagggttacgccgtcgttttgtcgtcgaggtcgtcgttttgtctgacaagctggaggggattcgcgtccggatctgacgaaaacgacgtcgtcgtcatcggcggcggtcccggcggctacgtggccgccatcaaagccgcgcagctcggtctgaaaaccacttgcatcgaaaagcgtggcactctcggcggtacctgcctcaacgtcggatgcataccttccaaggttcattttc

SEQ ID NO: 30781 - DNA, 408 bp, Glycine max
  modified_base (376)..(376): a, c, g, t, unknown, or other
ttggggtagattggggcgtggacataagggggtttatgacgcaatcaataattcaattcattttcaattaggtcttgctctagcctctttaggggttattacttccttggtagctcaacacatgtactctttacccgcttatgcatttatagcgcaagactttactactcaagctgcattatatactcatcatcaatatatagcgggcttcattatgacaggggcttttgctcatggagctatattttttattagagattataatccagaacagaatgaagataatgccttagcaagaatgttagaccataaagaagctatcatatcccacttaagttgggctagcctctttctggggttccatactctgggactntatgtccataatgatgtcatgcttgcttttgg

SEQ ID NO: 30782 - DNA, 406 bp, Glycine max
gtaagaaaggcagagttattgccattgcctcggcctcttgcaacaccaaactggtacacacttaataatattattataaaaattaacccaccaaatccactaaccctttttttaatacaactcattacctggattggaccaaggtgaaagtaaaatcatttgcaaccaatgccgttgaacatatttcaggacaaagatggattgccacggattatattgactgagccaaagggttcatcagctgaggttcttctttatggagggcatattatttcttggaagaatcatctaaaggaagaacttctttttatgagcagtaaggctaacaagaaacagcataaagcaatcagaggaggaatatcatcttgcctagcacggtttgtgatctcagttcacttgacaacat

SEQ ID NO: 30783 - DNA, 359 bp, Glycine max
gaaacgaagcctgttaatttcttcctacttggcaaactataggaagagccacacggtatcttataccataggtcaccatgatccttccattaaacgttgctatagaccgatccaaatgcatatgatatacactttcatgaatggctagctttatatactgaacctcatgccccgatgacaaacttttaagacacatacatatttgctggatttctcggcatagaccagatagagcatgtaattccaaattaacccataataacacttccgcttgctcaccatacatatattattgacgacggagatgccaatatccaagccttatctaacggataatatggtgaaagcttcaactggtc

SEQ ID NO: 30784 - DNA, 390 bp, Glycine max
ggagagaaagtgagagagaattacagagcatgttccaacacgattacacgaccgaatcaaacccctctttctctccgaagctgcttttaatatcgtactggccttcgattgttctcctctttaatacatactgttctctcttcgatttgagggaacagtacaagagtctgagcatcggttaacccaactgcacaggtagtctccaaataatggagcctcatgatgagactggatgccaggctcctgaacgccccattctttgcattaataattgtggcttctttggaagagcagctaccatgaacatgtgttccaagtgttacaaggacatgctgttgaagcaggagcaggacaaaattgcagcatcatccgttgaaaacattgtgaatg

SEQ ID NO: 30785 - DNA, 360 bp, Glycine max
  modified_base (323)..(323): a, c, g, t, unknown, or other
  modified_base (332)..(332): a, c, g, t, unknown, or other
ggggataagacttggcattttctctatatccatcctctcaccattattgcctcaatttcatactttctttcatgatcacagtttagggactgcaaattctctgcttctctacacatggagccggtgtcgcgtgctaatttcttttcattccaaagattttggctaccgtttcagggacagggagggatgaggcagcaagttgatccctcggctcacacaatcaagtcccatggagcatcacttgcaagaaaacacgctcgtgattggcttatattgctgcttctcatagtgatagagattgtcctttttgtcattcatccatntaaacgctntgtgggaagggacatgatggaaggacct

SEQ ID NO: 30786 - DNA, 295 bp, Glycine max
ggaagaggggagtcgttgccatcaaaggatgggcgccggttgttgttacagacatggctgcagcctctgatgaatgactacaactggctgcagcatggatgcaggtcatttgataggaaactcgtggaggaaggaattgggaggactattctcaccttgcctcttgaggatcaacaaagcattttactttcatggttggggagtttcttgaaaactgatgatagctgtcccaatcttcaaagggcatttgaagtgtggtggaggataaccttcattagggcatatgtggagaacc

SEQ ID NO: 30787 - DNA, 389 bp, Glycine max
gggacttgagatggcaatgggatcattagaacatcttctacaatatggagagcagaatattcgccgagcagttcctttggcccttggtctactctgtatatcaaatccaaaggtcaatgttatggatacgttaagcagacttagccatgatactgattcggaagtagctatggcggcagttatatccttgggtctaataggtgccggaacgaacaatgctcgaattgctggcatgcttcgcaatctttcaagttattactacaaggataccagccttctattctgcgtgcggattgcccaaggtcttgtacatttgggaaagggcttattaacccttaatccatatcattccgatcgctttctactatcaccgacagcacttgctggat

SEQ ID NO: 30788 - DNA, 393 bp, Glycine max
ggttctagtgtgtgattgtttgttgttgtaactcgttcttcttcttttgttgttctgtgtttgtgtttgttttttctctcacctgaaaatgtcttgctgcggtggtaactgtggttgcggaagctcctgcaagtgcggcaacggctgcggaggctgcaagatgtacccagacttgagctacactgagtcaaccaccaccgagaccttggtcatgggagtggcacctgttaaggctcaatttgagggtgctgaaatgggtgtgcccgctgagaacgatggctgcaaatgtggaccaaactgctcctgcaacccctgcacttgcaagtgaggtgttgggagagcaagcttcaagcagagatagcccttaattaggaataatgataaactattaat

SEQ ID NO: 30789 - DNA, 370 bp, Glycine max
ggttctagtgtgtgattgtgggttgttgtaactcgttcttcttcttttgttgttctgtgtttgtgtttgttttttctctcacctgaaaatgtcttgctgcggtggtaactgtggttgcggaagctcctgcaagtgcggcaacggctgcggaggctgcaagatgtacccagacttgagctacactgagtcaaccaccaccgagaccttggtcatgggagtggcacctgttaaggctcaatttgagggtgctgaaatgggtgtgcccgctgagaacgatggctgcaaatgtggaccaaactgctcctgcaacccctgcacttgcaagtgaggtgttgggagagcaagcttcaagcagagatagcccttaatt

SEQ ID NO: 30790 - DNA, 360 bp, Glycine max
ggaggaagaagaagtgacaaaagaggtatcatgttggaatggcttctctgctcctccctccaactgctacttcttccacacttaaacacaacaaccaaatcctgaaactgaaaccaaacaataatgctcatgctacatgtaacgtcttcttatcaaactcaaaccactaccgtttcaactctgcaaagtgccatgcattgttcgatgacgtggccaaagggttgttggagagcagcagtgtcggggtggaccagttccagagagtgacagaaggcttatccgacatgcagaggtgggtgttcctttgtctttggtgggttgacgtggatttacctgactgcaagaccaggtgttcttgtc

SEQ ID NO: 30791 - DNA, 409 bp, Glycine max
atcggagaaagagttcgtactcacattggatgactctaacggtcacgacactgtcagcaagcacgatttcatcgtcgtcgagttctacgctccatggtgtggccactgtaagaagcttgctcccgagtatgagaaagctgcttctatcttgagtagtcatgatcctccggttgttttggctaaaattgatgccaatgaggagaagaacaaagaccttgcatctcaatatgatgttaggggatacccaacaattaagattctgagaaatgggggaaagaatgttcacgaatacaaaggtccccgtgaagcagatggcatcggtgactatttgaagaaacaaagtggtcctgctttaactgaaattaaatctgctgatgaaactactgctttcattggtgaaaataaagtt

SEQ ID NO: 30792 - DNA, 414 bp, Glycine max
ctagatgaactattgataggagagaatgacaggatggagcaagtattagtacaagggcactgcaaagatcaaagaacggcaatggagacagcaaaaacaatcattttcttgggacttcttgaccagactgaaatccctgcttcctgcaaaagtgcttttgatgttgcttgtttccgcatggaggagaggttatcatacaccagcacagaaaaggatatggtgcttttgcatcatgaagtggaaatagaatacccagatagccaaattacagagaagcatatagctactttacttgaatttgggaagactcttgatgaaaaaaaccacaactgccatggcccttactgttggtattccagctgctgttggagctttgcttttattgacaaacaaaattcagacaagaggagtctt

SEQ ID NO: 30793 - DNA, 371 bp, Glycine max
ggcttgaaggaggctctagtgtggtctgcaactatgagcaaggattatctaatcatactttctctccttctttccacggtgcttgcaactgcaagttcttcttcttcttcttcctccctctatcttgggaagggcttctcccatcgcaaattgtctcccagttatcacattcacaaaaccattgacgaatcctatgcagttatcttcgatgctggtagcacgggaagccgtgtacatgtctatcgttttaaccaacaattagatctccttcgcattggccaagaccttgagttgtttgtcaagactatgccaggtttaagtgcttacgctgagaatccacaagatgctgcaaaatctcttattccactttt

SEQ ID NO: 30794 - DNA, 379 bp, Glycine max
ggtgagattggtgtgctttgttataagccacagcttttcacagctcgaacgaagcgactaagtcagttgctcaggctaaaccgtactacgttcttgaatattgttcaggccaacgtgggagatggaaccataataatgaataatctccttcagcatttgaaagagatcaacgatccaatcatggagggagttttggtggatattgagaacatgttagctcgtggtaggatggacctaccagcgagtgtgtgctttgcggcagcaagaggagatgacttgttgttgcatcaattactcaaacgaggcatggatccaaatgaatccgacaacaatcgaaggacagctttgcatatagcggcatgtcaaggaaaacagaact

SEQ ID NO: 30795 - DNA, 355 bp, Glycine max
  modified_base (28)..(28): a, c, g, t, unknown, or other
gtgacttgtgaagtacagcaattattangaagtaatcggattagagctgtagctatgagtgccacagaaggtctaatgagaggaatggaagtgattgacacaggagctgccctaagtgttccagtaggtggagcaactctaggacgaattttcaacgtgcttggagagcccattgataatttaggtcctgtagatactcgcacaacatcttccattcatagatctgcgcctgcctttatacaattagatacaaaattagccatttttgaaacaggaataaaagtagtagatcttttagctccttatcgtcgtggaggaaaaataggacttttcggtggagcttgagtgggtaaaa

SEQ ID NO: 30796 - DNA, 375 bp, Glycine max
ggtgcacagcttgaacacagcgcgtttcggagagagacgtcgcaatggggaggaggcctgcaaggtgttatcggcagataaaaaacaagccataccccaaatcacgcttttgccgtggtgttcctgatcctaagatcagaatttatgatgttggtatgaagaagaaaggtgttgatgagtttcccttctgtgttcatctggttagctgggaaaaagaaaatgtttcaagtgaagcattggaagctgctagaattgcatgcaacaaatatatggcgaaatttgctggaaaagatgctttccacttgagagtccgagtacatccattccatgttcttaggatcaacaaaatgctttcatgtgctggagctgataggc

SEQ ID NO: 30797 - DNA, 337 bp, Glycine max
ggtgtgagttcattaacatatacaaattctctgtgttgtgttgtgtacttgtgttaattgtgttgttgttgtaggaaatttaagtgaagagagaatgatgatgaagtctgctatgtgtgcattggtgcttgtggcactggttgtggttgaagtggggcccatggctgaggctgcggtgacttgcaacccaacacagttgactccttgtcttccggcaattaattcaggttctgcaccttcgagtgcttgttgccagaagctgaaggagcaaaagccatgcttctgtggctacctcaaaaaccctagcttgaagcagtatgttaactctcctaatgcc

SEQ ID NO: 30798 - DNA, 386 bp, Glycine max
gacagctgatggtggcgtcaccaaatacctgcatggtatgtcactttggaggatgatgttcttcgggaatttggtgcttataatgatcattgggtagtggcaaaaaatgaagaggaagctcagaaagaggctcgccagaggtataatggaaagcagtttcatttaagccaggatcctgacgttcttgatacatggttttcttctggtctgttcccattatctgagctgggatggcctgatgacacagaggacctgaagacattctatccaacttctgttctggaaactggccatgatatcctctatatctgggttgcccgaatggtgatgcaaggattgaagttgggtggtgatgtgcctgttacgaagatttatttgcatcctat

SEQ ID NO: 30799 - DNA, 408 bp, Glycine max
ggtatcacattggtttattttgaaaccctaaagtttgccgccttacacgttttttgtcttcttttttctcccatctttgtttcgagaagcacttgacgaagagaagagacagtgaatcgcggtttcaattcaacccacttcatctcaggtgtttgaagttgagataaaaatgagcggaacagagaaagcaggatcaggaaccaccaaaacccccgccgatttcctcaaatccattcgtgggaggccggttgtcgtcaagctcaattctggtgttgattacagaggtatacttgcttgtctagatggctatatgaatattgcaatggagcagacagaggagtacgtcaatggacaactgaagaacaagtatggtgacgctttcatccgagggaataatgttctatacat

SEQ ID NO: 30800 - DNA, 382 bp, Glycine max
gacaacagtaaaatcatattatacacaataaaaaaatgaagtaaatagtagaatattcaagaggccttaaaagatcaagataaagacgaaggagccgacttgatattttagcattataaccaaaaagaatagctttcggatctctattttttattatcgtcaaagaaaattagaatcataggattaaataaagaaatttcaaactttctattacacatatctgttttcgttacaagcagtatttgggtatttttgtttgagccgtacgagatgaaattctcatatacggttctcagggggggtccgttggtttacctatctcaataaagtctatgattggttcgaagaacgtcttgaaattcaagcgattgccgatgatata

SEQ ID NO: 30801 - DNA, 407 bp, Glycine max
  modified_base (341)..(341): a, c, g, t, unknown, or other
ttatgagttctaatatatcattcaaaagtttgtgaaatgttggcaccccttcttctatttctatgcctaactcttcctttgtttttgttgtccttcttcaaataccgtaaaaccttcaagaatccaccacttccaccaggtcctagaggccttcccataatagggaatcttcatcaactagatagtccttctcttcatgagcagctatggcatctctcaaagaaatatggtcctttattttcccttcaatttggattaaggccagccatagttgtttcctctccaaaattggccaaagaggtaatgaaagacaatgaccttgagtgctgtggacgacctanattactaggccaacagaaactaacctataatgggttagacatgggatttttctcatacgatagtta

SEQ ID NO: 30802 - DNA, 338 bp, Glycine max
atggcgattaacatcattcacgacacgggtattaatagggcgcatttgtgccagaaaatccttaaggtctacattcgttgtgttgttcttaaaagggtatctttcgttggacactatttccgctttatttgtaacatactttttgtttgctccgtctccggaaggccatctcagtaccggaaactacctgttcgacacccctcttcttcgccgtcgtactacgctgactacgacttcttttccgctacaactaccactggcggttattacttctattccgatattttgaaccttaatatcagcttgtagtcttattgccatattttaaaaactacttt

SEQ ID NO: 30803 - DNA, 366 bp, Glycine max
ggagaggagaggagagaagagaggaagttttggggtttgaatctatagaatagaatcaaaccaaattgaaagaagatcgatcgatcgatcgatggctctggtcggagttgaagtgaagcatgcggcggatggcgcaccggaggagaattgctccgccaagcccaccaagcagggcgagggcctccgccactactattctcacaacatccacgagcatcagctccttctccgtcaaaagacgcataacctcaaccgtcttgaggctcagagaaacgagctcaattccagggtgaggatgctgcgcgaagaattacagcttttgcaggaaccaggctcttatgttggtgaagttgtcaaagtcatggg

SEQ ID NO: 30804 - DNA, 399 bp, Glycine max
gacggctaaaagctaaaaatcatcgaagtagggaaatgagcatggctgtcacggttgcattcttgaatttgatcatcatgttttcagtagtctctacaagcaagtcactgagcttaaactactattcaaaaacatgccctgatgtggaatgcattgttgccaaggcagtgaaggatgccactgctagggacaaaactgttccagctgcacttctgcgaatgcacttccatgactgtttcgttcgggggtgtgatgcctctgtgctgctaaattcaaaaggaagcaacaaagcagaaaaagatgggccaccaaatgtttctttgcatgcattctatgtcattgatgcagcgaagaaagcactagaagcttcatgcccaggtgtggtctcttgtgctgaca

SEQ ID NO: 30805 - DNA, 330 bp, Glycine max
tgagaagatcgatgtagtgaaggaatggtcgtgcgttgctctttcatcaagttgttgtatacccagaggccaaggacaacataattgtactatgactctatgagggccaatattggtatacttgttcaaactacataattttctgatctgccttgtatacaaagtcatgcaatattgccatagcatctttttaattattttctctgattttctttgtctattgcatgtgtggttctgtgtgcatgtcagcctgtgtaagctttcccgtgagtacgttgggaaatgtacaagttagcgaagctttagatttttcttaaaaaataagacatt

SEQ ID NO: 30806 - DNA, 383 bp, Glycine max
ggcggacaaagaaaatcaaaattatgaatcggtaaaaaaaattaaaaggggcgtgggtgtgtgtgtgcgtgtgtgagagagagagagaaagagagagtgaaacagcgcaaagaagatacaaaattgagacgaggctgaacaaaaataagagtgtttagtttcccttctgatggtcgtgagtggttcctccccactaacttcgaagaggagaagggtcaccaacttttgttccaccgacatggacgctgaaactgctaaggccaagcttgctgctgtgaaagaaagatttggacgagagatccatgtttttgaaacatcagttctttcttcatcttcaaaggctgcgttatccaatgaaggagaggagacggatgacttctatg

SEQ ID NO: 30807 - DNA, 362 bp, Glycine max
cgatggagaaatggtggtttaattctatgttgtttaataggaagttagaatacaggtgtgaattaagtaaatcaatggatagtcttggtcctattgaaaataccagtctaagggaagaccctaaaattttaaccgatatagaaaaaaaaattcacagggatttggattatttagaaatggaaggttttttttctagcgatctgaatactgtttctaagaatgatgatgatcattacatgtatgagactcaatttagttttaacaataatattactagtttcattgatagttgcattgagagtttcaatttaggtgatattgacaaatacaatgatatttatttttatagttacatttttttg

SEQ ID NO: 30808 - DNA, 299 bp, Glycine max
ttcaggcttctgctaaaagctaaaaatcatgcaagtgcgcaaatttgcatggctgccacggtttcattcttgaatttaatcatcatgttttcagtaatctctacaatcaattcactgagctttatctactattcaaaaacatgccctgaccttgaatgcattgctgccaaggcaaagaaagttgccactgctatggacaaaactgttccagctgcactttttcgaatgcacttccatgactgttttattcgggagtatgatgcctctatgctgctaacttcataaagattcaacaatac

SEQ ID NO: 30809 - DNA, 347 bp, Glycine max
gtaacgaaagcgtcgctagttcgttccattcggctctccatagaaacgcttttgacaaaatcctaacatttgttgtggcagttattgaaatccaaattctcggggcagatatctttcgaccttgcttcacaccattcaacgaactgcactcactgtgctctctagaaccctaacttttgtgctaaaaccctaaaccacgtcgaatcgatgattgaaccctacaacaagctggttaaactagcggcgagggctttttacgatgatcttaccagcaaaggagataatcagcccaaaacgggaaggagtgataacaggggaatagctgtggtggttcttgacgcgctcac

SEQ ID NO: 30810 - DNA, 397 bp, Glycine max
  modified_base (369)..(369): a, c, g, t, unknown, or other
gaaagagagtattttatggtggacttgaccacgaattacaaaatgaggtatggggtttgcttttgggatattatccatatgaatcaacatatgctgagagagaattcctgaagtcagttaagaagttagaatacgagaacataaagaaccagtggcagagtatatcctcagcacaggctaaaagattcacaaaattcagggaaaggaaagggcttattgagaaagatgtggtgagaactgatagatcactcgctttctatgaaggcgatgataatccaaatgtaaatgttctgcgagatatcctgttgacatattcattctacaactttgatcttggttattgccagggaatgagtgatcttctatctncaatattgtttgtgatggataatgaatc

SEQ ID NO: 30811 - DNA, 268 bp, Glycine max
gaaggtttaatattttattttatggtgtactaacccagtctttgtttaatgttgtacggggtttcctttcctaatatcattcacataaaaaaacatattctgcagatataactcctaaattcagaaactacttcaaaatccgtaaccattactaacccttcacaatatacacactcttcacctacactaagacaaccaccacccataccttggtcattgctaattcacacatataagctcaaatctgagatacctaaaatctttttat

SEQ ID NO: 30812 - DNA, 350 bp, Glycine max
ggagagaagagaagcaaacgatggctactttgctttcgaaccaatctctgttgggttcttgtccttgttctactcccttctcttcaaagccctttcaaaccctaaaaccccaaatcttatcttttccatctcgcgggtttccgcgccccctaatttcctcagtcaatcgaagaacccaattgaagtcttcccaagatttccctccaactacaaatgatgaaacagaggagacccagaatgatgtaagagggacaaatgatgatgaagataaaaaacaagtacctagtttaatgatcctccttgaagcatacaaggaagcctttttaatggcgaccaatataccgtagctc

SEQ ID NO: 30813 - DNA, 352 bp, Glycine max
ttctctaaaacagttcctttattactatcatggaactggggaagcgtcctttatattctgtattttccacaaagcctactcaagtttcctctgtggaaaacctctatgaatctatttgctcagcacctttactcgacacattacgcctcacacaatagcagagcctcaaaaagctaagatttatcattactatgtacctgtctttctctgctgtgaacagcacattactgaacatcattgccatttcatacattgacaatatataccttctttagtgattggttatacagctcctcaaagctgacataagacaacccttgtctttgctcttgactatcatttcgaaaccatt

SEQ ID NO: 30814 - DNA, 433 bp, Glycine max
  modified_base (14)..(14): a, c, g, t, unknown, or other
  modified_base (21)..(21): a, c, g, t, unknown, or other
  modified_base (85)..(85): a, c, g, t, unknown, or other
  modified_base (96)..(96): a, c, g, t, unknown, or other
  modified_base (106)..(106): a, c, g, t, unknown, or other
  modified_base (111)..(112): a, c, g, t, unknown, or other
  modified_base (170)..(170): a, c, g, t, unknown, or other
  modified_base (229)..(229): a, c, g, t, unknown, or other
  modified_base (242)..(243): a, c, g, t, unknown, or other
  modified_base (264)..(265): a, c, g, t, unknown, or other
  modified_base (293)..(293): a, c, g, t, unknown, or other
  modified_base (364)..(364): a, c, g, t, unknown, or other
gtaagaagaataangaataangaagaaggagcgacggaaaaaagacctcggtgagattgtctatccgaggagcgtccagaggaangagagaatgangaataatacnagatnnagcgatggagatatcctcgaagaagaagaagaagaaagaagggtggaagggagaaagntgaagtgaaagagaaaaaagggtgaagaaacaatggtggctttctggaattatgagcanctgagtcatttgnnaatctctcggattggtctgannacctacttataaagccattatggatatngggattccaccacatgaaactcagattcaagcgaagggcaattccaccgcttttgaattggaaaaagatgnttcttggtgctgcaaggactggttctgggaaaactcttgccttcttaattcctgctgtggagctgttgt

SEQ ID NO: 30815 - DNA, 219 bp, Glycine max
gatcatggcggcagcttgttgtctctgcatcaaagcggtctatctgccgatccggggacttcgcctcacccgacgcttttaccaaactacaaaacagccatccagctaaatccgtggcacaacgcgtactacatgttcatccaccacaacttacctatgaaccccaactactgcatgcgcagctctttttctgcaccgatcgcatgtgttaacctactt

SEQ ID NO: 30816 - DNA, 227 bp, Glycine max
caagaccgatgatatttacatttaccaaagaatactttggacttatatttatatcgtaaaaaaataaatatagataataaaaatttaaacttttataaatattgttcgtacaagcagattggtattttgttgagccgacgagatgaaatctaatacgtctcagggggtcgtggttacctattaataagctatgatggtcgaaaagtttgaattagcgatgcgtgatt

SEQ ID NO: 30817 - DNA, 238 bp, Glycine max
tgtaactctctgtagactacacgcgcgtgattggactctggggtaacccgataaccactcacatatttgataattgcatcattgatagtagctgctttgaacttgggtgctctgcttcttctgctaaagaaaatgggtgttttcttgatcacaccagctatcactttcagagctttctcattgtctgctttcactgcaagataaatcttggccagtgtaaagatatctacatgtacag

SEQ ID NO: 30818 - DNA, 428 bp, Glycine max
tacccaatcgagccacacattctaattctatcgaacgttttattaattttttttctatttctttttttcgacattaatacgggacctttatcatgaatgctactactattacattaagaaataattcttcattctcataaagattaaactttaagtccatattttgccctattatccatccaatttcaacacaaaatgttatcttcttaacgaaaatgtaaacttgaactaaattaaatacttttctttattattaggaacttattaattaaaaaatcatattactttccattaattctttattaatccatcaactactacttaaatgaataaatttcaaaaattctatgatttcattatttaattttaatcctactattatcttatatatcccactaaaatattttttttttcttattttttaccaa

SEQ ID NO: 30819 - DNA, 370 bp, Glycine max
gggaccacacagttaaaaaaatgatacactaagcgagaaagttttcttaccgagattgcagggaatttatccttttggattctacccaaagaagataaaattctcatcttctaatataagtggtgaccctgtctcttcacagttcagcgtttcacacctagacaattggctcagaagaaaagaaaagcaaccaaaaatggttctcacatccactgccacacacccagatgaacaagaccagagcctaaactatacttttgcttccagatatgtgcgtgaacctattccaaagttcaagatgctggagaaatccataccaaaagatgctgcttatcagataataaacgatgagttgatgttggatggtgca

SEQ ID NO: 30820 - DNA, 351 bp, Glycine max
gatcacaggccagggaacttctaacacatacactactctctctctctattttattgtatggccggcaattccagaatccgaagcatcaccttcttatggaaacaagtccccaaccgtatctggacttacaacgctcctcctctcacttcaatgacgggagcatacattagcggctgcatgtacgacaagaaccctgacgatgagatccactcgtgcgcacgtgcccgacgatgtgatccaggcagatacacagtccggctaatactgggccacacatccacagactgaggtatctgagccctccggatgatgtgaacaaactgcttgcgacattcactcttgtgcgctata

SEQ ID NO: 30821 - DNA, 323 bp, Glycine max
gttgaacatggggaaaactttgtggacatgcgggatgggatcttctcatttggtctactgtacacccgtgacaacagttttatagcggctcgggatgctattggggtcacttccttgtacattggatgggggttagatggctctgtttggatttcatcagaaatgaaaggcctgaatgatgattgtgaacactttgagtgtttttcacctggtcacttgtactctagcaaaaaaagagggttcctcaatatggtcaatccttcttggttctctgaggctatttcatctgtcccttattatccttttgttttaatacactcttt

SEQ ID NO: 30822 - DNA, 400 bp, Glycine max
acacgtgatcgctcaagaagcttatcaaactgttcaatgagagatttgtaatttactgattgcatttccatgttgttattgcgtgtttctatctggacataagaaaagttattaagaccaaacaaagtaagaatccagtgctttgaaagaactcctacacctgaaattatatcacctagaaaagcaaatagaactgaaatagtgaaatctcattaagcagaaagcaacttcgacagcaccacaaaatggtcactgtagaaataattgtgaccataattcaactttacaaaggtaaaatccaattcatattaatatcattttaaactcaatgaaaatatttggcatgaaccaactgtcccaaaacctattttatattttatttttagagaaaataagaaaa

SEQ ID NO: 30823 - DNA, 377 bp, Glycine max
ggcggcgcggcagagcaaatacattgcaggtgatctttcatctcagaacgtctgatttgagcctctctcagtgacaacagtttctgagtcttactgatcttttcttctctctaatctcttgtgatttttcttctctctaatctcttggttgcgtggcagactaaatgattttgtgtttttggttctcttttaggtgcgattctgattctcttctcttaaatcattggctttgattgtattcattggtgccatggcgtttcccagtttgattacaacaatcattaagtcgtgtttggttctttgattttctttttctttttcatgtattggtacgataagtcttcagttttttcatatccttacttgcagccagttct

SEQ ID NO: 30824 - DNA, 382 bp, Glycine max
ttaagcaaggacgatgagtatagtgggagtagtcatattcagagtgtatagtgattctgattctttcattttccatagattagcaagcaatcgagcgagggagggagagagagagagagagagagagaatggttcgggaagtatcagagagttgcattgatagcttattgacggagatggtggcgtgctattgcaaccgattctacgcaaacaagcctgaactctccgcacgccggatcgaggccattggatatcatgtcggtcaccagctctctgaaaggtataccatggatcggcctcggttcacggatcatctggaggccatcaagttcatctgcaaggatttctggtctgaactctttaagaagcatattgacaactt

SEQ ID NO: 30825 - DNA, 392 bp, Glycine max
gggaagagttttgctactaggaaagtggatgcaattcaaaagggaaatgtcatattcactttgctggcttcatttcacaaggaagaagtagggtttcaccaccaggaagtgtctatcccatcagtccctgctccagatacgcttttatcgttggaagagcttcgggaacaacgtcttactgaccctcgtctcccaagaacataccggaacaaggttgctacaattgaattcattccctggcccatagagatacggttctgtgaacctaaaatttcaacaaatcagaccaaatctcctcctagtttgagatattggcttagagcaaggggaaaactttcagatgatgaagccttgcataggtgtgtggtagcatatacttcagatctaatctt

SEQ ID NO: 30826 - DNA, 384 bp, Glycine max
ggcacatgggagttggtacggaaacggtgcattcgagcgcgtgtttatctagtctctctgcgtggatctgcagaagtggaagaagaagaagatgcagtggtactttgtcgctgcgctcctcaccgtcctcaccagttctcagggaatactaaccaccctctcgcaaagtaaaggagagtacaagtatgattacgccacggtcccatttctcgccgagattttcaagcttgtggtgtcaagtttgttactgtggaaggaatgcaaaaagtcacctttgccaaagatgacaacggagtggaaaacggtgtctctgttccccattccctcagttatatatctgatccacaacaatgttcagtttgctacactcacttatgtggacac

SEQ ID NO: 30827 - DNA, 190 bp, Glycine max
tttgcttaggtgcaatacagagctattgagggcgcattacacgctcaacctcatactcaacaactcgcgtaaccttctcacccttgacgagaatatccccccccgaaatttcaatataaaatctctcccccaaaaaatctcactttactgtctcctatatgatacacaaaacatttttaatcaccctctt

SEQ ID NO: 30828 - DNA, 285 bp, Glycine max
ttgcttcggtgcaagagagagctgtgtagggggcaatacgcgcgtcattccatccgcaacatcgcgcgtaaccttctcaccctcgacgagaagaacccgcgccggatcttctagggagaggcgctgctccgaaggatgttccgttacggtctcctcgatgagacacagaacaagcttgattacgtactcgtcctcaccgcacaaaactttctcgagcgccgacttcaaacccttgatttcatgttcggcatggccaagttcatccaccatgctaggggacttatt

SEQ ID NO: 30829 - DNA, 362 bp, Glycine max
gggtggagagaggggcactgactcacacccacaatagtcgggggcagcttcaaagtacctccacattgtctcctactcttactgttctcttctcttctcatcatttttattttttccaatcaaaccaaacaaaacataagcaccgctcttttctctccgaaatccccatctcccttcacttctgagctctggacgagatcccagatctcaccatctttcacgcactcttccatcagattcaccctttcgtttaacgcaaactcataacttgaaggttaatggctgctccaccggcaagggctcgtgccgattacgattatctcataaagcttctcttgatcggtgacagcggtgctgggaaa

SEQ ID NO: 30830 - DNA, 383 bp, Glycine max
gaggtgacagttgcaaataggaacggagagaggttctgcgccgttgcttatcctctgagctgagagcagaagagaacaagaaacgtcgtcgttctgcactttgaactttgaagttctaacaccttcttatcttatctttctctctacctacagcttcaccaatgactatgactggtttaatttcaaaccgcaacttcgcttccttctttgcctcaggaaatgtatatagatcgggaaaggatatatccgttcaaagagggggaatttctatttctggtgtatctgttgctaaggatccctttccaagatggcagcataagatgtatttgccattggaagagagagtttcaaaacaaatgcaaacatccaacaacaaaagggag

SEQ ID NO: 30831 - DNA, 143 bp, Glycine max
ccctattcttttacttctcctttgggtcttttgcaccaacttgccctctgcttctcttccttctactgattcctgcccagaagagcattagacaaatacttcagtgttttttttagatcatagagttacacatactctttccc

SEQ ID NO: 30832 - DNA, 348 bp, Glycine max
ggggtaaggggggaatgtcaattggggaacatggagaaggcaaagaagagaatatggctgcttggcttgttggaataaactctctcaagattcagcctttcaagcttcctactttgggaccccatgatgtcagagttagaatgaaggctgttggtatttgtgggagtgatgttcactacctcaagacactgaggtgtgctcactttatagttaaagaaccaatggttattggtcatgagtgtgctgggatcatagaagaagttggcagtcaagtgaagagtttggtgcctggtgaccgtgtggcaattgatcctgggatcagttgttggcgtttcgaccactgcaaac

SEQ ID NO: 30833 - DNA, 393 bp, Glycine max
gtatcaggcacttctcatgatcatgggttgcgttcaccaagtgctggaatgttttatgcgatgcctgaaaattatgtacaccagccttctaattctaattatgacagacaagcattttctgctgctgatggggtttttaatgatcttacaatgggaaatggacgagggcctcaaaagcgaaagagccctggaattcctcctgtctgtgaatgaggcagtacaagcagatatttcaatgctgcaagtgcatctgatcgtcctacatcttcagaattgtggccagagaagcccaatatggattctctatatatgccttgggatcatgttaatatgacacccacatttagaggtagaagcctttctatacggggcgaagggtcctttaagaatgtt

SEQ ID NO: 30834 - DNA, 326 bp, Glycine max
acttatcattatcatgttttgggttcactatattctggaatgtctccttccattcctcaaaattttatacaccacccttctaatattaattattacatacaaacattttctccttcttattaaatttttaaccttcttacaattatatatgtactatctccttaaaatcaaaacataccttgaattcctatcacttcttaattaatcacctcattcatatttttcaattctctatttacaacttacccatatacattatctctaatttttaccataaaaatcccaatatttattctctatataatacctttcaatacatttaattt

SEQ ID NO: 30835 - DNA, 212 bp, Glycine max
gggcttcggtgcaagagagagctgtggagggggcagtacgcgctcagccgcatacgcaacaacgcgcggaacctcctcaccctcgacgagaagaacccgcgccggatcttcaaggaaaaggcgctgctccaaaggatgttccgttacggcttcctcaataagccccagaacaggcttaataccgtcctggccttaacggctaaaaccttctt

SEQ ID NO: 30836 - DNA, 375 bp, Glycine max
tcaggcacactagttataaaggtttttaatgggataacgcagatgaatatttgttagacattaaatattctcttattaaaattatgtttctgaatctgaaaaggaacacctacatcttactatttgattgtggacagtaaataaataaagaaactcgattcaagttttgtccataaattgaaaaatatgtttgcagaacattttgctctcctagtaaatgcataataaaaatcaatgagtgtaacttagttgtacacttatttaacgtaaatgttgcactttgtatctcaactagtagttgttttaggtcaacataataagtatgttaatgtaagatatgttaagtgtttagctagatagcacccgttcaatgtt

SEQ ID NO: 30837 - DNA, 238 bp, Glycine max
gtttcaagagtgaagagcgaagagaatggctcgcgaaggtttaatctttttggctgtgttatgcttctcagcactgtcactgagtcgttgtcttgcggaggataatggacttggtatgaacttctacaaggaatcatgcccctaggctgtagacatcatctaagaacaagtcaagcttctctacaagcgccactagaacactggtttcttctggctcagaaacatcttccatgactgt

SEQ ID NO: 30838 - DNA, 416 bp, Glycine max
agggaagaagaagaagaagaaagagaagcaaggggaaagataagggttagaaggcgaagaagcatggcttcactcaagaagaagaaaccctattacccgcttccgttaattcctatctattactacttcttattcaaagggtgatatgatcttcttcttccaagagtctcatgcatgctactttcttctctcttctcggggaattgaagcgttgtggtccgattgtttgctagatcaagcaaattaacctgtatactgggttatatatcttcaccttgcacctttctctctctctctctatctctctctctctatatatatatatgggtttaatctcttactatctttatcttttcactttttttcagatctggtttgatttaattacgtgattaaaaattacatatatggatttg

SEQ ID NO: 30839 - DNA, 331 bp, Glycine max
tgggcccacaggaaatgtaagatgctgataaagttataccccattttcatttcattacacagctccttttctctctcttttctctcaccccactttcgttctttatctctatcttcactaacataacataggatcctttcattgtacttctcactcatgaaagagatacatatatagaaatagaaacactctttttgagaaacaatcatataatcggcatcatcatcatcattcatagagtgcagagaatgaattcttcttctgctcagagcagcgactatgatctctccatcaagatcttactgatcggtgactctgctgagggaaaaag

SEQ ID NO: 30840 - DNA, 299 bp, Glycine max
tgtcaaaaaaaggaccactatttgattccccgggaaatgtgaggatgctggaccagcttaaccccattttcatggtattaattctacactacagtgtctaatacatatgactctaattctttttaagacggctcttattttggaccgtcttagaaagcgtacattgtaatacggatattagataacgacccacttataaaaacacttcctcttatttgagaaacatggatcatgtttgaaaatacatcatctatgacagagtgcagataatacctgtttctataagtccaattttttaa

SEQ ID NO: 30841 - DNA, 374 bp, Glycine max
  modified_base (347)..(347): a, c, g, t, unknown, or other
gacagtggatgtggatccaaactctccaacttattccaaagtcatccataggcttcctgttccttatttaggtgacgaattgcatcacacaggctggaattcatgcagctcttgccatggagacccctcagcagaccgacgatttctcatcgtacctgcactcgtatcaggtcgagtatatgtggttgatgtgaaaacaaatccaagggctccatctttgcacaaagttgtcgagcctgccgatatcatacagaagactggattagcttatccacacacatctcactgccttgcttctggtgatataatgatctcgtgtcttggagataaagatggaaatgctgcangaaatggatttcttcttcttgattctg

SEQ ID NO: 30842 - DNA, 373 bp, Glycine max
  modified_base (63)..(63): a, c, g, t, unknown, or other
  modified_base (71)..(71): a, c, g, t, unknown, or other
tttaggggtagagagagagagagaaagtgtgagtgcagtggcaacaatgggagagagtccacnaagcccanaagcgaagttggggatgcgagtggaggatctttgggacgttcaggagccacagttgagtcccactgagaagctcaacgcttgttttgaaagcatccctgtctctgcttttcctttggatccttcaaacacagaaattgagattaaatcagacgcgaccctagcagatgctgttaagatattggcgcgacacaacgtattcagcgcacctgtggtggatgttgaggcgcctgaagatgctagttggatggatagatacatcggaattgttgagtttgctggaattgttgtatggattttgcat

SEQ ID NO: 30843 - DNA, 239 bp, Glycine max
cgagggtatcaactgtgtatgaggagagagagaaagtgaggagcactagcactacacaagctccgaaataaggaggggcgagaaattttggatgcgttggatttcgtagatctgacacataaattgtggtggcagcacaatggatcctggcagtggaagaaacaagctttggcaccactcttaatttgctttaaaacaacgtttaccggggacaccttgattacattaacccctttgtg

SEQ ID NO: 30844 - DNA, 188 bp, Glycine max
  modified_base (56)..(56): a, c, g, t, unknown, or other
  modified_base (133)..(133): a, c, g, t, unknown, or other
accggtctcggaattcccgggtcgacccactcgtacggactgcaaaaaaccaccanaaggggccgttcaagggtttcgtttcggttttaacggggtgcacattcattttttgcgcttgactcactcccttcgngcggtttactttctttgtcgaactcgagcgaaaatgcgtgagattcttcacatac

SEQ ID NO: 30845 - DNA, 362 bp, Glycine max
  modified_base (6)..(6): a, c, g, t, unknown, or other
cggggntgcctgtcatggaaggtaatactactacaaccactgtaccttcagggccaccaactaggaaccattcttacacacaacaccgtttacattcagaaagacatagccataaccatagccatggccatttcccctccaaaaccattctcataatcatcgcattcgtcaccttagtcacggtcctatttatcattttcggggtcctattcttgatccgtcgccaaaaatcctccagcaagaatggaacttgcgaagaagacagcaaagagcttcctgacacaagcagcaggctcatcactttaacaacgttgaattctagcccaaatgtgaaaagtgggtgtcttcatgggggaaatttg

SEQ ID NO: 30846 - DNA, 324 bp, Glycine max
ctaaaaactattctaaccctaatcgctggggtttttaaaaaaaatggggtcatccaaattaaaccaccattctcacattctacttcccttctaagaacctcaacacacctctatccctaccttatcacactcttatttttcatactttatgtcacaatccaatatccctaacacttcatatacatcttttctcaacatttacaaatctactcttattaccctcacaaactcttatccactcccatctaaatcataatccactcactcttattcattcaaattactcatactcacttaccattattaattcatattattattatc

SEQ ID NO: 30847 - DNA, 118 bp, Glycine max
acgcgtccgaatactaccgaactattttccaaaggggcttcacaaaaacataaagccgcttttctcacatgtgagataatactcatcactcccacttattcaaaaaccccaccaacta

SEQ ID NO: 30848 - DNA, 384 bp, Glycine max
  modified_base (46)..(46): a, c, g, t, unknown, or other
accgggacagaatggccgggtcgacccatgcgtacggccaggcgtncgaacacgtgtgagaaggactacaaaagggctggatacaaacaacagagggatgattaacattgatggattgcgattcaggttgcataaacttggtcattaagttcccgaattagatgtacaaactcttatggaagctggtgatgtaaatggtgatgggcacctacattatggaaagtttgtaaccatttctgctcatctaagaaagatgggaaatgattagcatgttcgcaaaacctttcaattttttgatcactacaaaagttaggatattgtgaacgaggagctgcttagcgacttatctgatgatcttgaccccaacagcgattaagttatcag

SEQ ID NO: 30849 - DNA, 274 bp, Glycine max
ggtgctggggatgtattacattgaaacactctactttacttttgggtacatgtatcgtttcgtttagtttcatcccacttaacgtatttggttttttttcaccgataactaatgtcttgttaatgtgtggaaaggctactagatattatctgattataagtaaagttatgtggttcacattcatgggcatgtacaacgcaatgaatgtaacataacccatgaagtgactaattactgctaacttgctaattttactgatttttttaaattacgc

SEQ ID NO: 30850 - DNA, 175 bp, Glycine max
gcaccagatggggtatgggttaacgtagcaaaggatgggttcttttccttgaagccaccggatcggtatcatgcctcttacatggatattcaaatgcattaagtgtatggattacaggctacacagtgaatcgcgtagatggtagatagtgtgaacagacacttttctatgaatg

SEQ ID NO: 30851 - DNA, 499 bp, Glycine max
  modified_base (274)..(274): a, c, g, t, unknown, or other
tccggaattcccgggtcgacccagccgtcctccggttgcaaaaggccaccgaagggggattaaggattggaaccaccaaagcctttctttaaggcggcctttaaaaatttaatgtaaaggtgggtcaaatggtttaatctttcgaagccttgaaccctggaaacaaaatgaaagtttatgcacaaaatactttgttcctgaaacagatcaaagtgaagtgacaagccctgatgatcccctgcctgaatctccaaagtgtacagtccattcattntgcaagacactcactgcttctgacactagcactcatggaggtttctctgttcttcgaagacatgcagatgatcgtttgccaccactggatatgactcagcagcccccatggcaagaattagttgcaactgatctgcatgggaatgaatggcaatttagacatatttttcgagggcaaacccagcgccacttactgaccacttggttgagtggctttgtcagttcc

SEQ ID NO: 30852 - DNA, 311 bp, Glycine max
gttacttaaccaggttaaagaagaacattaatggacttaccaagcaaccctatggcgaaagtgggttgtgtcaccggagacagctgggccctatgatcatgggtgggcctactctacttctaaagcgggtacacactgtatgcgaccgtacaagatatctagggttaaaatgagacgaaacattttgaggaaatggtaggagcatcaagtaatcttcattattttgtaaaggagcttcttgacatcgactacattatcgctgatataatagggtgttctctcgtaatacaccatgcttgttataacatcat

SEQ ID NO: 30853 - DNA, 381 bp, Glycine max
  modified_base (353)..(353): a, c, g, t, unknown, or other
ctgtgttgtctgtcatggaagttaatactactacaaccactgtaccttcagggccaccaactaggaaccattcttacacacaacaccgtttacattcagaaagacatagccataaccatagccatggccatttcccctccaaaaccattctcataatcatcgcattcgtcaccttagtcacggtcctatttatcattttcgtggtcctattcttgatccgtcgccaaaaatcctccagcaagaatggaaccttgcaagaaaaacacagaaaactttctgacacaagccgcaagcttattactttaacaacgttgaattctagcccaaatgtgaaaagtgggtgtcttcatggnggaaatttgagcaggaccccagcaccta

SEQ ID NO: 30854 - DNA, 110 bp, Glycine max
gaattcccggctcgacccactcgtccgcccacgcgttcgaatactaccgaatgatgttcactagttacttcacttaaacataggtcgtgttttcacacaagggagttaaa

SEQ ID NO: 30855 - DNA, 250 bp, Glycine max
acgcgtccgaagactaccgagtggattacagaaggggaagaaagagaagtaaaggagactgctttaccagtggggatgttgtttctgtcgtcggtttcggcagaattgggttcgactaccatagtcccgatacattccccctgacctctagattaaatgaaaaaaccgactataaacagtttgattgttaaaggtaccattatttcattagtaatgtaatcattattgtcacgggcttcgatcctattta

SEQ ID NO: 30856 - DNA, 312 bp, Glycine max
tcccgggtcgacccacgcgaccggtcacgcgtgcgcggacgcgacgacggacgcgtgaaggaagagagtggtgtacgacactggtgctgtcgactcgatccgttacccctgcccgaacatagcagaaccaaacgacgcccaggtttcggaattgtgttctaggtttttgagtttcgattccgatcgaccgacgatgctggccaatcatttccaaaacggcatcgaaacggcgaggctcgtttggtcgcggattcctaattcggaagaatcgcagctcctcgacgacgccgttggcatccttaagaagaacga

SEQ ID NO: 30857 - DNA, 353 bp, Glycine max
cgcttttgttttacgcgacttcaacacccatatccagttgggttatccaacactctacgtcaacacattgacaagccacttccgtcaccatcatatcacaatcatcattactctcactatcctatcacctccattctctctgttcatcatgatcatctctacaactctttcacacaactgttatcaccatagctcatagaaattatccttcatatcatactatatatataacatcgctttcagaagccaataacatgattcatgtcctggactatattcatctttgcacatagtattactacatcaacaatacattgttagaatacactacatgacatcctgcactacatata

SEQ ID NO: 30858 - DNA, 391 bp, Glycine max
ccagtcgtacgtacagatccaagaggcctccttaagggggagcaggattgaacagcgatgagactggctcccaacgctgcaatcttttagactgagctatgctaatcaccactgcaactgattctgtgtattgctgatgataatgtacttggtatgaactcttacgtggactcatgctctcatgctgaacacatcatcgaagaacatgtcaatcttgtgtacaaacgctacaagaacactgctctctcccggatcaaactcatcatgcatgactgggctaatcagagttgtgatgctgcactgtggctggactccacacgaaggagctcttatgagaatgatacacatagactctttgatatgagagattctatgtacattgagaccatca

SEQ ID NO: 30859 - DNA, 282 bp, Glycine max
gggtccacccacgcgtccgcccactcgtacgaaccgtttcgagagcactctataatggcgagcatgagtgaataacgcaggggctaattcacaacgatttaatgtcagcgactaacatatgctattcagcactgcaactcattcagtctaatgctgaggacaatcttcttcgcatgaacacgtacatggactcactccctaataccgaatccatcataaaagtatatatcactctatctcacacattctacacgaactcttttctttcctttataaaaatca

SEQ ID NO: 30860 - DNA, 412 bp, Glycine max
gcgagaagacgaccgaaggggatttaaatgaagggttcaatgcagatgatggggaatgtagtgagatgcctgggtctacacctgctgcacgattggtcagtcctgttccattttctgcttcatccatgtcttttggtattctctcgatcacagtagctgctgctgcaaagagcccctttgtggcacctgaagatttattgaaaagtaaaaaggagcttggttggaagggatctgctgctactagtgcatttcggccagctgagcccaggaaagttatggaaattcctcttgatatgtcaactacccctattcctaatgatgaagctagaaagcagagccgggcaccattggattttgacttgaatgtttctgatgaagtaatacttgatgatgtttcttcccaaaattgtgc

SEQ ID NO: 30861 - DNA, 339 bp, Glycine max
acgggttccaaaaaacccccaaagggggtttctagcgtgcgatagactgtagttctagcgcctacttattcttaggtcaaccatctctttatatcacctattaatctcacctgaaaatgcctctctactctaataacttaattctctcaagctcctgcacttccatcaacaaatgcgacagcttcacaatgtacccaaacttgatctacactaagacaaacaccacctagaccttcctcatgttatatcaacctcttaaaactcaatctgattgaacacaattaccaattccccctaataacaacagctgcacatatgaaccaaactactcctgcaacc

SEQ ID NO: 30862 - DNA, 391 bp, Glycine max
cggggcggcccaagccgtccgcccagccgtccgaccggttgcaagaggccacctgaggggggaggttatgggactggttgggagcttttacaaggaatcatgccctcaggctgaaaacatcatcaaggaacaagtcaggcttctctacaagcgccacaagaacactgctttctcctggctcaaaaacatcttccatgactgtgctgttcagagttgtgatgcttcactgttgctggactccacaagaaggagcttgtctgagaaggaaacagatagaagctttgggttgagaaatttcaggtacattgagaccatcaaagaggctctggaaagggaatgcccaggagttgtttcctgtgctgatatcctcgttctctctgccagagatggc

SEQ ID NO: 30863 - DNA, 311 bp, Glycine max
gggaggacacctaagggggcccttgttgaagggaatgctttagcacacttaaggccgggcaaaacagctgtagcaaatataccatatggtggggccaaaggagggataggctgtgacccagcagaattaagtatatctgaattagacagacttactagagtttttacacacaaaattcatgattcgattggaactcacacagatgtgccagcacctgatatgggaacaggaccacagaccatggcatgcatactagatgagtattccaaattccacggctactctactgcagtagtgactggaaaacctat

SEQ ID NO: 30864 - DNA, 416 bp, Glycine max
gatttaattgaagggttcaatgcaaatgatgggaaatgtagtgagatgcctgggtctacacctgctgcaagattggtcagtcctgttccattttctgcttcatccatgtcttttggtattctctcgatcacagtagctgctgctgcaaagagcccctttgtggcacctgaagatttattgaaaagtaaaaaggagcttggttggaagggatctgctgctactagtgcatttcggccagctgagcccaggaaagttatggaaattcctcttgatatgtcaactacccctattcctaatgatgaagctagaaagcagagccgggcaccattggattttgacttgaatgtttctgatgaagtaatacttgatgatgtttcttcccaaaattgtgctcgtcagactgattgtggaactca

SEQ ID NO: 30865 - DNA, 188 bp, Glycine max
taccgattctcaattcgcgggacgacccacgcctgcttacagatgacgacgacaacggaggggggcgattaattactagcaatgagcaatagggttggtttgttacctattccgttaggaactgctcattttttggttcatcatattcatgcatttaccatacatgttacaggattgatactcctcaa

SEQ ID NO: 30866 - DNA, 293 bp, Glycine max
ttgggaatcgaatagaggttatagttcttaaggtctgggtcctccttcgtgggtggcgatgatattcttctccttagcggatactcagatccattgagcaaactcatattattaatccaaaacctctcagatcctcggaggcggcgttacttaaatgaagtcctcaagccgtctctttacgatcggactgttgacgtcgttgtactcctgcaacattgatgtactgatgctcaacaaggaccttctcagcaactatggcttcaagtatcctatcttactcaccatgtgccaca

SEQ ID NO: 30867 - DNA, 450 bp, Glycine max
ccagatgaccacagactgcggatatgggaaacagtgagagataatgatgatagagatcagtgactcactcttaagggccgaagcagatccagatcaattgcttatgtaagatgtatcttctggaacttttcactctcctcctttgtatcaatcagaagatactttgaactccaacaacataatataatgctaagactcacacatcacaccacaacacatcacaacacagaaacacctacttcctctttccttatttgctcaaacacatagcaccataactagttctaatttaatatacacatcacaatacaacttttcctctgtatcttttattatcattttcatagtaattataatcgaagaagatttaagaagcgtatattcaacattattccaagagactttacctctctccatcgatatgtttaagtgttaaatgcattaaatggg

SEQ ID NO: 30868 - DNA, 402 bp, Glycine max
gatagcagaggacctgaagtgatgcgcattgttcctcgtctaaatgaggacataaatgaagaatggatttcagacaaaacccgcttttgttatgatggtttgaaaaggcagaggttaaatgaccccatgattcgtggttctgatggacgctttaagcctgttaactggcgtgatgctcttgctgtggtagcagaggttgcccaccaagtcaaaccggaagaaattgttggcatagctggcaaactttctgatgctgagtccatgattgcactaaaagatttcataaataggatggggtcaaatgatgtatggggtgaaggcattggtgtaaatactaatgctgatttcagatcaggatatattatgaatactagcattgctggtcttgaaaaagcggatgcg

SEQ ID NO: 30869 - DNA, 398 bp, Glycine max
aggcgtccgaacaggtgagtattgacctcttataatgagatacgtactaacgagggtgaatgtgctgtgtcaccagtactacgacattcattatctagaagactcgcatttttgcaagcacattagctataacgtctattgcaacatttatatggattcactcaggttgaacttaattgacgctgcgcagtttcatacgcttctatagttgaaacaactaagttttaccaacaaggtttatccacgtgctgtgcatttcatattggagcattttctttgaacatattgtcttgccaaaccatgtgtgtaaaaccctttaacttattaaggcttgaagctttgtataaattgatttgatattcaaactatgaaactttgaagactttatggattatttg

SEQ ID NO: 30870 - DNA, 481 bp, Glycine max
  modified_base (91)..(93): a, c, g, t, unknown, or other
  modified_base (114)..(115): a, c, g, t, unknown, or other
  modified_base (203)..(204): a, c, g, t, unknown, or other
  modified_base (253)..(254): a, c, g, t, unknown, or other
tgcctcgtaccggtccggaattacccgggtacgaccccacgcctgtccggcttttgcgagaagaccgactagaagtggatattcagtgttnnntaaaaaaaccgtggaagattnntaaatgtgtcgattctaccaacagtaacccttgataatgtgctcttgaaaatgggctgtcagtgatttgaccacccatcttaaatcanncttaatcttggatgctctcgacagattactcgatgcctggacttagcannaatcttaccagtcttgagtggattgataacatttggatctctttggagcacgcatttcagacaatggaactacatttttacgatcgttcaagaacttgcaatcccttgaaatatgtggcggaagattaactgatgctggtgtaaaaaatataagagaaattgtctccctgacacagctaaacctgtcccagaattgtaatttgacggataaaactttggaattgata

SEQ ID NO: 30871 - DNA, 320 bp, Glycine max
ggagagtcagattcgcacgcattgcttcgcctcacaacagcagttgcagcagcaatggctcccaaacgaggtggaaaggctccggctcttgccgctaagaagaagcctgagaaggtcacgaatccgttgttcgagaagcgtccgaagcagttcggaatcggaggggcgttgcctccgaagagagacttgactaggttcgtgaagtggccaaagaatgttcaaattcagaagaagaagaggattctgaagcagaggttgaaggttcccccagctttgaaccaagttaccaaaactcttgacaaaaacctagcaacaagtct

SEQ ID NO: 30872 - DNA, 319 bp, Glycine max
ggagagtcagattcgcacgcattgcttcgcctcacaacagcagttgcagcagcaatggctcccaaacgaggtggaaaggctccggctcttgccgctaagaagaagcctgagaaggtcacgaatccgttgttcgagaagcgtccgaagcagttcggaatcggaggggcgttgcctccgaagagagacttgactaggttcgtgaagtggccaaagaatgttcaaattcagaagaagaagaggattctgaagcagaggttgaaagttcccccagctttgaaccagtttaccaaaactcttgacaaaaacctagcaacaagtc

SEQ ID NO: 30873 - DNA, 316 bp, Glycine max
gagacctcaggccaagcggcgcttcccgttgaatctaaacatatcaatgagcggataaaagaaagcaaacatacttgatcaggtccgccgccgttctagaagatacaagcttacttgcgcgcgcaagcgacagaatagtttttctgtagtgtgagcgtaattgaagagactgggcggacgtttacaacggcgggactggcaaaacccggacgttctccaacgttgattggcagcatcacatgccgctttcatgagctggtgttatagagaagagggctgcagcgatagctctttccaacagatgcgcaggctgtat

SEQ ID NO: 30874 - DNA, 359 bp, Glycine max
atcaatcccagggaatgatgagagctgcagagatgtgttacagaaagagtctacaattggcatcccaacggggcagttggagtgggaagctctcaagtctgttgagactagcactacttgcattaaaagtctgtatggctaacatttccaatgatcactggccatctttggttcaagaggctacaactgaggccttgaagctttgcttttgtccactggctgttcttttacaagctttgttacaattcaaacgcaaaatgggggcaagagagacacggcgtcttttggaaagagtggtatatcagcctgggtatcccaaatctattgcatcaactgcacgttggtacctactgaaacac

SEQ ID NO: 30875 - DNA, 287 bp, Glycine max
ctcaaggatgaggttttgaagattatgccagtgcataagcagacccgtgccggccagcgcaccaggttcaaggcatttgttgctatcggggactacaatggccacgtctgtctgtgcgttaagtgctccaaggaggtggccacacgtcatactgggggccatcaatcctggccaagctctgcatcgtcctcaggcgcagaggctactgttggaacaagatcgtcaagctttacactgtcccttgcaaggtgacaggccgatggggctctgtgctagtacgcctcatt

SEQ ID NO: 30876 - DNA, 334 bp, Glycine max
ggatggtaggattaagttgctgagtagttgtgtaatcaagattttatgtaacatttgtaaagggaaaattagcacttttgtggttcttaagggaaaagaaacagaccttgtggagattataatttccttggtttctgttaccactgttagagggagttgcatcatttaacatatagtaggatagtttaagtgtagggaggacaattattgtctgaagctaaaatgggttatttataggactgatggaaatgatttcatctctgccatctctaaagcacttttcattgaacatgttagcctatgatacgtacagtaaattaacaatgatagcagc

SEQ ID NO: 30877 - DNA, 292 bp, Glycine max
tggtcccaggggttcagctgaggtagggacgtgctgtaggccggaatgttaccggctgttggatctgcggatgaggaggaggatcctgcggaggaggattgtcctgaattggttcccattgagacgacgcaaagcgaggaggaggaaaagtctggcctcggcgccaagatcccagtcacaattatcaccgggtatttaggtgctgggaagacaacacttctgaactatattttgacagagcaacatagtaaaagagtagcggtcattttaaatgaatttggggaaggaagtg

SEQ ID NO: 30878 - DNA, 384 bp, Glycine max
gtccctttggggtgtctcagtctagaggtacctccctccctggggggtctcagctcctggagtcgcaggcccttggggcccctctgtgagatctcaatgctgtctggggaccctaagagttttctcacctgttcagtctcatctaaccttccaatgtctgatgttcctgccaaattcctgcctgattctgggtccgtcctgacctccaaaggtcagcttggtgcttgaggtctccctgctcttggtggcagtggtagcagcaacagcagcagcagcagcagcagcagcagcagagacctctccactttcccttagcccctctgctgggtagagaggcactttcagggacttccctccagctgcctcttcatctgggaatgagct

SEQ ID NO: 30879 - DNA, 473 bp, Glycine max
acccgtacggaattccgagtcgacctacgcgtacgcgcacgtgcgggtacgcgaggacgacacattggggataagaaaggcacaattatacacattgcctgtgcatattgacacaccaaactgatccacacttaataatctcatagtaaggaatagcgcaccagaagtcactaacctatttactcatacagctcaataaccgtattggagcagggtgaaagtcaaatcatatgcaaccaatgccgatgaacatacatctagacatagatggattgacgcggattatattgactgagccatagggttcatcaactgaggtgcttctttatggaaggccgattattacttggtacaatcatccaatggaagaacacctttttatgagcacttatgcttacaagaaacagcatagatcaatcacaggaagaatatcaccttgcctagcacggttaggcgatctcaaatcacttgaa

SEQ ID NO: 30880 - DNA, 336 bp, Glycine max
gcgagaagacgacggcgagggaggattgcttttcaccatgatgagacaagcaccgtattgtgtggcgcctgtactataatggcccttacagagcttctatatgaagaactggcagatgctggttgaagagctatacgtggctcataaactacatttagaaccggaggcgcctatccgggacttacgaactcgtatttcatgtaccgacattgagtcgcttatgccgatagttaccagtacggactacatccacgcctgtcatctgtgctcgcagctgactctgaaagctatgctttccgttcaatgccataacctggatatccggatgattgccct

SEQ ID NO: 30881 - DNA, 308 bp, Glycine max
ccaagaaatagaaattttactaatgttaaaattacataaatatggcaaaagaaaaggattgtttttgtatcactgcataatctcgatggctagacttctaaacaaacaccgcctattataaactacattccttatggtacatagtacaacccatgattccagaacaaatgatgagataaaaaagcccagaaacaaggagcagtctggtttccacatcaaccccccattcacctttgttcctcatcatggggtcagaacaaacaatttggatctctgatggctctcaaccacctgcagttgccaattga

SEQ ID NO: 30882 - DNA, 53 bp, Glycine max
  modified_base (41)..(41): a, c, g, t, unknown, or other
gagacctcaagtcaggcggggctacccgctgagtgtgagcnaaaaaaaagaaa

SEQ ID NO: 30883 - DNA, 376 bp, Glycine max
taccggacttgaattcccggctagacctacgcgtgcgtgcacgcatacgaccacacgtgcgctatgagaatactacagactgtgaaatgaatgtgtcggaccccctacaaaaccctagcacacttttatcgcttaatgactactacagacgatgtaagcaactgcattcgcaatgggaattgatgtgaaagcctgatgtgagtccaataagaccatgctatccgaacacatatccgatgatatctaccttaagcttctcgacgagctgatccggcatcttgttaggaagactggcagtaacttcaatgctgctgtcctcaagcgccttgtcatgagcaaggtcagcatagcccacgctatacctctctagattgat

SEQ ID NO: 30884 - DNA, 135 bp, Glycine max
gaatttccagttcgacccacgcgtacgcccactcacacgttccactacacgacgacttctgaactatgtcaagagatgtgaaaacctgggtcgggtatattgcctacctgtgataacacatggcctattctaggc

SEQ ID NO: 30885 - DNA, 383 bp, Glycine max
gtaaaaacaagactagcgatattagaatataattctcacaagacgagtaaaaaatcataaattaaaagatatgttcaaagcattatcaatctacagaaacccacccccttaacaataatcctaagttgagaaaagaaaagtcaagagagttgcaaataaatagaaaaggaaaaaaaaggggaaaaaacattaaaactgatacattgcaagctggaatgatacacatgcccacaatagcatcgcctgctgctcagcttccacttggaaagattcagttataattcaagtaaacaacacatccaccgaagcctaacttcgaaaatataagtatcaatatgattcatggctctgatttggacaaggagatgagcttgcacattact

SEQ ID NO: 30886 - DNA, 243 bp, Glycine max
ccgctccggaattcccgtctcgacccacgcgtgcactgctacaagacgacagcaggggactgtaaaccatttattacaatgcacatcaatttcattgtcttgttatatgagcaaaaatccatcttcaggtggatcaccaggaagcatttacctatatgtgcgatcaaatgctatatctgcatattgatcagaatgatctggatccctatcttctagttcatataggatctggtgatctcatga

SEQ ID NO: 30887 - DNA, 186 bp, Glycine max
aactgaagaccttcaggtttgttttttaaacatcgatggttttctcacaatcacaaatctagtctccaaatttggttatttcataggtgtgtactgttaactttcctgtttctttcatattcaatctcaattctagtttatctttaatctcttactcgtatacatacttttatgtatacttcttat

SEQ ID NO: 30888 - DNA, 483 bp, Glycine max
  modified_base (86)..(86): a, c, g, t, unknown, or other
  modified_base (132)..(132): a, c, g, t, unknown, or other
  modified_base (174)..(176): a, c, g, t, unknown, or other
  modified_base (188)..(189): a, c, g, t, unknown, or other
  modified_base (200)..(201): a, c, g, t, unknown, or other
  modified_base (247)..(248): a, c, g, t, unknown, or other
  modified_base (267)..(268): a, c, g, t, unknown, or other
  modified_base (304)..(304): a, c, g, t, unknown, or other
  modified_base (340)..(342): a, c, g, t, unknown, or other
  modified_base (362)..(363): a, c, g, t, unknown, or other
  modified_base (397)..(398): a, c, g, t, unknown, or other
  modified_base (408)..(409): a, c, g, t, unknown, or other
  modified_base (433)..(434): a, c, g, t, unknown, or other
cggttctcggaattcccgggtgcgactccacgtcgtctccgtacggcttttgcgagaagtacgtacagtaaggtgtggcaccaagnttgagtttgttggggatcgagataacgtgagaaacccagtgtgatngtaaaatgaagggtccttgggttttcttcgttggctaccaannntttggtagcatnnggcaatgccanntgcgtacgaatatgttcccttcttcctgaatgaaccactggcttanntggtgcccgtacttccggnnaggtgaaattgcgcaagttggagtgctttgctgttnggaagcacacatacatctttaggctttttgagaccnnnattcctgaagaaagtgcgtnntgaagcaaccaaagggaataccatttccatggcnngaacaatatnnagatcagacttccataaacatgtnntaaccaacctaagcttaaacttttatgctcagaagaacctttcgaagtc

SEQ ID NO: 30889 - DNA, 221 bp, Glycine max
aagcttcagaatccaccgaagggtcatcataaggctaataatcatgtttttcagggtggtgctctgtgctttaattctttcttcttctttcgattgtaccattttctatattgctttctgttcttctctatttttggcttttatctttcttcccctaactatggatgcatgatcctttagttcttccggaacccttaaaacacgatcactggaccctcttt

SEQ ID NO: 30890 - DNA, 289 bp, Glycine max
acgcgttcgtttacaattttacttacatagcaagagtgaattagtagcgaatcgcgtaccaaaattggcatagggtatactaaaagcacacatcacacaatacactttcaaattatacccttaagcgcgccctcttattaaactacaattatcactcatttccagaatcccttattactttatatctctattctaattctaattccaatcacaaccataatctatttccttcctttcaaatctacagtttcatatacccaatagggttccaaatttttttttccttttc

SEQ ID NO: 30891 - DNA, 237 bp, Glycine max
ccacgcgtccgatgacgcgttattacgggtgggaggagacaacttcatgcggaggcgggacggacccttggtagaatgtagtataggtcgaacatggaccgtagcagcaatggcgggctttcatgatgcttaatcatttgtgaacctggagatgatgatcaagatgtcctaagcgaccagttagcttcgctaactatctacaacccaatgagctagatgttggataataggaatgct

SEQ ID NO: 30892 - DNA, 67 bp, Glycine max
accacagaagtccccgcctacgttgcggacccccaggagaccctttcgtcaagccggatcaaggcct

SEQ ID NO: 30893 - DNA, 475 bp, Glycine max
  modified_base (212)..(213): a, c, g, t, unknown, or other
  modified_base (275)..(276): a, c, g, t, unknown, or other
  modified_base (337)..(338): a, c, g, t, unknown, or other
  modified_base (346)..(347): a, c, g, t, unknown, or other
  modified_base (356)..(358): a, c, g, t, unknown, or other
  modified_base (366)..(366): a, c, g, t, unknown, or other
  modified_base (409)..(409): a, c, g, t, unknown, or other
  modified_base (415)..(417): a, c, g, t, unknown, or other
  modified_base (446)..(447): a, c, g, t, unknown, or other
gtactcgcgtccggaattctccgggatcgatcccacgccgtgccgtacctggcgagtaagaccgacagtaaggtggataccttaacatggtgtgagcgtcaagaaaagggcgtctaggggaaaagagcaccaccatcagttcagttggttaccatgttccgtaagtattgagtagttacctcgcagttagtaatcctatggctttaatagcnnatttccctcttctcttcaaacgccaaaactctcggttttaaaattatcgtcactttgtttgnngcggttcagctatctgaaaccgggccgaaagggggtgggcccattcccagaaaagcgaagnnccggatanntggatcccnnncagcagcngtcccgtgtagatgtcaggactccgggtcaaaccgttaaacgngctccnnngtcacgccgctttggcttcttctttcgcnncgacggccccgtctaattttgtggtctg

SEQ ID NO: 30894 - DNA, 124 bp, Glycine max
gtttatggatgtggtcacagaaactatatgacatgttttctggttttctatgctgtcctatgactttgttataaaggaggagtcaaatgtgggaaggttttttttggtatgaaaaaaaaaacaa

SEQ ID NO: 30895 - DNA, 313 bp, Glycine max
ggcagcatttagtagcaaagtcttgcaggccacaatgcaagactttgcagaatctcatcaactttcacttatgtgttcttcttattcatctaatgttgatgtctttgacactggcaagtacaccgccaagctgctaagggttgaatctgaatcagaatcatatacacacaacaacaattttccaccaccaccaaagtctctcttgattgccactcctcttgaaggtggagatttccctcttctgctgtttctgcatggctatcttctttacaattcattatactcccaactaatacaacatgttgcttctcat

SEQ ID NO: 30896 - DNA, 294 bp, Glycine max
aattccgggcgacccacgcgtacggcacgcgtgcgcacagactgtttcggatccgagaatacttcaaaagcgggggccatgttcaattgcactcatgatcatccctaacatgacgagaatatacaccctgatcactagcattgctgaacacatgccttactaggcaaatcaccaaatcacgtatcagaagactttggccagatcacaattcaccatttatcatatatgtcatcatctgaggctccggcatccctctaacactggctcccctgcctcttgacgtgcacctctggc

SEQ ID NO: 30897 - DNA, 76 bp, Glycine max
ccacgcatgcgtgcgggaggaccacaaactggggcgcactgcttgttagcgcaactagcgcctcgacccagctggc

SEQ ID NO: 30898 - DNA, 77 bp, Glycine max
gatggaaagagccgggtcttcattaatgggaaagccatttattatttcatgggaacattcacttttaatcaatacac

SEQ ID NO: 30899 - DNA, 63 bp, Glycine max
aggggtgttgagaaatggatgaagtaatggaataagaggatcgctatgactatagctcttggg

SEQ ID NO: 30900 - DNA, 377 bp, Glycine max
gagaaggaaaatatgtgagctgagatgttccaagacaattaattcatggcactatggtaaatgtgagacagaaaatcctagctgatgcatcaggtgctatgtctcgagcagttagcattgctacaagaaatagagctggtagaagacagtttcgatcacatattggagggctagaaacacaagtgattgattacaatacacaacaggctatgctctaacctgtgctggctgatgcttatgctattagatttgcgggtggatgtgtgaaatggctttatatcgatgtgacggaaagattgcaagctaatgattttgcaacaatgcctgatgctcatgcatgccctgatggattgaaatccttgactactacagcaact

SEQ ID NO: 30901 - DNA, 293 bp, Glycine max
tggggagagagagagagatatttaaggatctggtgccccttcttaattcttgtgatgggaccaattctttaatgagcctgagagagatggcgcaatactaaccatcaccataatttattggtattatttatggatgagtgtaatgtatgtatgaaaacaaaaatacttgcatctctcttgtgtctcaccgaagactatgctgatcttaatctgtgcgacatatgcgatcagttccatgtaactgaacacatcaacctcgatctttttctgagaatatttaaggcccacaatct

SEQ ID NO: 30902 - DNA, 323 bp, Glycine max
tccgggtcgacccaagccgtccgccaagccttccgaccggttccaaaaggccaccgaagggggacaccgtcaaattgggagaatgggttttcgggatgaccatgattttagtatgcattcggatttccgtcaaaggcaatttggtccacaaggagctgtgaggggtggacattatgcacgtatccgaggtgctgcatttgcgggaccatctagaccttatcatgatagagcatggtacggtatccctgatggaggccctagtgagcctattcctccaaggaggccctactccccaggtggacagtttgacatgccttttatgg

SEQ ID NO: 30903 - DNA, 273 bp, Glycine max
  modified_base (88)..(88): a, c, g, t, unknown, or other
cggactcatgttcggcttttataagacaattttaggggtttcatcttcaacttatattctggatatccggatgatactatgagcaatntagcaccttctactactttgtaatcaatcaagagctgtgaactgtgaagaacgagttcaacatgccgtgcttggacttggagcgtgatagcaagttgaagagtggttgaggccttgaaggaccatcgtttatgcagatggaacattgtgatgagatcatcacaacaacatgcttaacataatatg

SEQ ID NO: 30904 - DNA, 276 bp, Glycine max
ccactcgtacataacctccgagaggactacagaggggagtcatggagccagtcattatgacaagtgaagtgctgcctgctctggaggatgctctatctaatgatcgacccgatctctatcaccaggatcaaagttactgtgtaaatgacctttagcactggcggcatgcataccgagcagaggtgctgcttttatgaacgacgtgacccgattgacaactattaactcataggtgactattaaattcatgccccatatatactgtgtgaatgacca

SEQ ID NO: 30905 - DNA, 331 bp, Glycine max
gcgagaagacgacagattgggggagtggaagtagtaacaagtacgtcgcatatgtggttgatcttttgctggttgatagttttgttccttccaattgtcagatctgaatcaccggactcactcttcacactcactcacactgaatggcttctgaaggcgaccatcaccaccactaccaccaccatcaagatcacgatcatcatcatcatgatcatgatcaccatcatcatcacgatggagagggagagaccaactcatgggtaggtaaggatgggaaggtgtaccatagccacgatggtctggcgccgcattctcacgaacccatttactt

SEQ ID NO: 30906 - DNA, 371 bp, Glycine max
taccgtccggaattcccggtcgaccacgcgtcgccacgcgacgaccgtcgatacctacgcacgatgaccacaggaaagcgatatctactgaggctgcagtctataggagaagcaactaccgagcatgagaatgctcgatgcgaagtaccaggtggcggacatggcggtgatgatacatgtgaagaacatagcggacatgggggcgtacgtgtcgctgctggagtacaacaacatcgagggcatgatcttgttctcggagctctctcgccgtcagattcggagtgtgagcagcctcatcaaggctggccgcatcgagccggtgatggtgctccgtgtcgacaagggaaaaggttacatcgatctcagcaagc

SEQ ID NO: 30907 - DNA, 377 bp, Glycine max
gtatcaagggataaataatcggaccggtccttagatttttttaaggctttaagggagccgtatgaggtgaaaatctcatgtacggttctgtaatagagatggtaacagtaatgtcatcaccgactaggattatctaacagtttaagtacagttgatatagttgatgcacaatcaaaatatggtttttggggatggaatttgtggcgtcaacctatgggtttcattgtttttctaatctcgtccctagcagaatgtgaaagattaccttttgatttaccggaagcggaagaagaactagtagcgggttatcaaaccgaatactcgggtatcaaatttggtttattttatgttgcttcctatttaaacctattcatttc

SEQ ID NO: 30908 - DNA, 301 bp, Glycine max
attgtgattttttttatttttttggggattccgatattcggacgcatgaacttgttatgaaatcacattgatagcctctactcgggtcctagctcggctaatagctagatttgcctcaattggttggctcttgcctttcgccttattcaaattagcttctgctatttcaagagtttgctgcgctttttgcggatcaatggcactaccctttttcgcatcatttacttaaaccggtgatctcattattgctgattctaacaaaaaccgccattataggcatcgttaacccatgggctttaaa

SEQ ID NO: 30909 - DNA, 405 bp, Glycine max
taaagggacggcttaaggctaaaaatcatcgatgcactcgaattagcatggctgtcacggttgcattcttgaattcgatcatcatgttttcagtagtctctacaagcaagtcactgagcttaaactactattcaaaaacatgccctgatgtggaatgcattgttgccaaggcagttaaggatgccactgctaggtacaaaactgctccaactgcacttctgcgaatgcacttccatgactgtttcgttcgggggtgtgatgcctatgtgctgctaaattcagaaggaagcaacatagcagaaaaagatgggccaccaaatgttactatgcatgcattctatgtcattgatgcagctaagaaagcactagaagctttatgcccaggtgtggtctctagtgctgaca

SEQ ID NO: 30910 - DNA, 385 bp, Glycine max
ttattttttttttttatgagcaaccacaagcgaactgtaaattcacaattcatagtaaatgaaagacacttttagatttttatttatttatttggtatcatcctaattggggccataacatttggtcccaagtatctcgaacaagatttagtcgcacttaaaacatttcactcctccttaagagtgtattatgtgggattgaacccagatccttttccacagattgtagtcacgcagagtcaaaccatacgtaatgttaattaaataaataaaatatcttcatctataagaaaagctcctaaattacaaaagatcaaaataacttcaaattacataaataactcctattaattagcatcaattcttttctccccttctttttttg

SEQ ID NO: 30911 - DNA, 436 bp, Glycine max
  modified_base (81)..(81): a, c, g, t, unknown, or other
  modified_base (168)..(168): a, c, g, t, unknown, or other
  modified_base (205)..(205): a, c, g, t, unknown, or other
ccaccggaagggtgggccaaatatgtactacaacccctttgggagtcgggtttgttaattttttccccctatggatgcctncaaacatgataactcttatggggattatgttcctactagtgtctgcattgcttggttatatatactccccacaattggacacacctncttcaagatgggttcattttgctcatggactacttcntgttttataccaaacatttgatgctgttgacgggaagcaagctagacgaacaaattccttaagcccattgggggagctctttgatcatgggtgtgacgcacttgcttgcacatttgaagcattggcttttgggagcacagccatgtgtggatgaaatactttctggtggtggttaatatctgcaattacattttatggtgcaacctgtgagcactatttcaacaatacact

SEQ ID NO: 30912 - DNA, 361 bp, Glycine max
accggtccggaattaccgggtcgacccaagcgttcgacgaagacgacagaaggggacactaaacaagttaaaagaagagcatcactgaactaacaaagcaaccctatgtcgaaggtggtttgtgtcaccggagccagcggcgccatcggatcatgggtggtcctactcctactccagcgtggttacaccgtccatgccaccgtgcaagatatcaaggatgaaaatgagacgaagcatttgtaggaaatggaaggagcagagagtcatctccatttgtttgaaatggatcttcttgacatcgactacattgccggtgccataaagggttgttccggcgtaatccaccttgcatgttctaaca

SEQ ID NO: 30913 - DNA, 181 bp, Glycine max
acgcgatcgggctcatacatgaagacctccgacaccgggcatcttggagtcagctgcttttacggctatggtacccacacactgtcagttggtctgaattctcgttctgagttagagcgtttcgatgagtattcatgatatgagacgaggagcatggtaccgtattccatgacaccaagaa

SEQ ID NO: 30914 - DNA, 432 bp, Glycine max
  modified_base (346)..(346): a, c, g, t, unknown, or other
gatggtcgaggagaaatttcagcttcggaatctcgattaatcgaatctcctgctcccggtattatttcgagacgttccgtatatgagcctctccaaacaggacttattgctattgattcgatgatccccataggacgtggccaacgagaattaattattggagacagacaaacgggtaaaacagcagtagccacagatactattctcaatcaacagggacaaaatgtaatatgtgtttatgtagctattggtcaaaaagcatcttctgtggctcaagtggtgaataccttacaagaaagaggagcaatggaatacactattgtagtagctgaaacagcggattctncagctacattacaatacctcgccccttatacaggagcagctctggctgaatattttatgtaccgtgaacgtcacactttaatcatt

SEQ ID NO: 30915 - DNA, 411 bp, Glycine max
gtgattgaatacaaacctgtaacatgaaggctacgactattacagtaagaaatagtgctgcagtctcaaaaagttgaaagtttaagtccataggttgccctattatccagccaataacaacacaaaatggtatctgcataaggaaaaggaaaacgtgaaggaaatgaaagactttttgttattaggaggaacttataaatgaaaaaagcagattactgtccatgaatgctgcatcaagccatcaactactacataaaggaagaagttgaaaaaattcagtggtttcatcacttagtttcaatcgtactattatgttatatatcctactaaattttgctttttcttatttagacaacatgccaatcttttagcatggtgaactccatcagaaaaatgcatcactaaagttct

SEQ ID NO: 30916 - DNA, 410 bp, Glycine max
gtaatgttgatgatttggggcttgcattttgattgttgttagttagggattgcattagctgctatttctttatgcagttgttgtgatttgtggaagtagactagacactaggaacatgaaatttgatgtttgattttgttaaaactgatgttaattgaatgtgtttagaatgtttgaatttgaacctcggaagaagagtaataggcgtttgtttagaatgtttgaatttgaacctagggattgcgttagctgttatttctttatgcagcagttgtgatttgtggaagtagactagacactaggaagatgcaatttgatgtttgattttgttaaaactgatgttaattgaatgtgtttagaatgtttgaatttgaacctagaagagtaataggcatttgtttagtttgttt

SEQ ID NO: 30917 - DNA, 493 bp, Glycine max
  modified_base (24)..(25): a, c, g, t, unknown, or other
  modified_base (79)..(81): a, c, g, t, unknown, or other
  modified_base (99)..(101): a, c, g, t, unknown, or other
  modified_base (110)..(111): a, c, g, t, unknown, or other
  modified_base (130)..(131): a, c, g, t, unknown, or other
  modified_base (160)..(161): a, c, g, t, unknown, or other
  modified_base (184)..(185): a, c, g, t, unknown, or other
  modified_base (229)..(229): a, c, g, t, unknown, or other
  modified_base (252)..(253): a, c, g, t, unknown, or other
  modified_base (264)..(264): a, c, g, t, unknown, or other
  modified_base (285)..(286): a, c, g, t, unknown, or other
  modified_base (306)..(306): a, c, g, t, unknown, or other
  modified_base (316)..(316): a, c, g, t, unknown, or other
ggacgtgtctaaaagcttaaatanntcatcaaagtacctcaaggatgtagcatggcttggtcatggttgggcgattctnnngaatttgatccatcatcnnnttttcagtnnagtctcttacccaacaggnncaagtcacttgagccttaaaccctactanntgcaaaaacccatgtccctaatnngtggagttcaattggttgccataggggcagtaaagggatgcctnactgctagggaccaaatactgtnntccagcagctnaattctgcgaatgccacttcnncatgattgtttcgttcgggnggtgtgatgncctctgtgccctgctaaattcaaaagggaaacaaccaaagcagaaaaagacgggccaccaaatgtttctttgcatgcattctatgtcattgatgcagcaaagaaagcactagaagcttcatgccctggtgtggtctcttgtgctgacatccttgctctggcagcaagggacgcagtt

SEQ ID NO: 30918 - DNA, 439 bp, Glycine max
  modified_base (51)..(51): a, c, g, t, unknown, or other
  modified_base (412)..(413): a, c, g, t, unknown, or other
cgtagcacgaattgatacgcgaaatacccaagaaacatagtgtcagtcacncttcgttctctcttcttgtccctcgatatctgttaggttcgcattctctgtcatatcatacccattgatgccgtcgatctcccatatttctcactgtgaatagtattgaatgaaacgaatatgatgaagtaactggccaggagccagaagcaatgggcttctgtggcatgagaaactgctagatcagttgctttgtcccaagaagatgcatgaaagaagctcccaaagttggcgttgtttgccgaatcttcaatgtgccaacatcacaaatcagtctgataccctggacctgccagtacaagcatgatgtaatcttgatcattaatacagcttaatggttaccccattattaacagggaannatcgtcaatttctaaatctatcatca

SEQ ID NO: 30919 - DNA, 324 bp, Glycine max
gcaattcccggatcgaccgacgcgctccacgcgtgcctgcgagatgacagaacaacaacggactgtggcatgactgaaccgatccacgcttttggactaggagctttcacttgataataagaataataagatgcacttgatgcttgggaccccttgcaagatcatcaacacttcatatatccctatagttttgatatgtcttttacttttacagatacgggaattgttgctgtctccaaggctatggatgtgaactagcaggctcatcctggacctggaaacacagagacagccccttatgagcctttgaaactgcttcacttt

SEQ ID NO: 30920 - DNA, 468 bp, Glycine max
accggaaattcccgggtcgaccaacgcggtccgacggcttggaaaagaccaccaaaaggggggggagggggaatttaaaagaaagaaaaaaagaggttggtggtaaaacaaaagaatattattgaaacataaattttggactttctttgcatttggcagccacccccacaacgaaataaaacaaaacaagcacacaaccagagacacacacgcatagagagagagggagagagaagcagaggaagaaagagaagaaggagatcttgagagatcaagtcgcaactcgtcatggggagagaagttacaggaatgcaagttgtggacaagaagccaaatggtgttataccagcttcaaatggtagttctaatgataaagtatgcttttctcctaaaatggaagcagctaaggttcaggcgaaggatcacaaggtaaatgaatgtaccaaaactaactcttttgaggagaaa

SEQ ID NO: 30921 - DNA, 410 bp, Glycine max
ccggcaaaatagatgagcatgccatttaaaatatcaagacagaataattcctacgaacaaagtgtaaaacaatgagtattctcatctaatgaaataaagcaaatgacataatgcgtaaagcaacgttcatatcacacgggcaaaacaattagtatcccatccaacaaaaatcataaaagttaaaattcaataaaaaagcatcaaataagttttaaacagataaatggatgaaagcaactacacatttagtccacttcctcaatcttggggccagcaccacttccaccagaaggagcagcataatcatcctcggctgccccagcaccagcaccacccatgtcaggaccagcaccaccttggtacatcttggcaatgataggattgcagatgctttccaattccttcatttt

SEQ ID NO: 30922 - DNA, 437 bp, Glycine max
ggtgaacacaaagctggagagtaccatggtgagcacaagccagagcacaaagaggggttcctagacaaagtcaaggacaagatccatggtgagggcggcgccgccgagggcgagaagaagaagaaggagaagaagaagaaggagcatggccatgagcatggccatgacagcagcagcagcagtgacagtgattaaactgctgcatcacctatatatttaaaaggtttatgggaccatagtagcgagggctgtgccttaatttctctctctctctctctctctctctctctctctctctctctttttcctttttccctatcttgtgatctatttatgagtgagaaaaacaaaagtgagaaattgtgcgtgtatctggttgctaattcgagtgctattagtctgtggtttggttggtttgtaaccccgctacttgggtt

SEQ ID NO: 30923 - DNA, 306 bp, Glycine max
gcgtctcatgttgcggatgtcgaatccattgctgatgcggctaaacgggctggcggtgtacaggatccactcttacgtacctcagaatcctatgaaataacgtatatattgtgaaagcattgctgaaattattggaccaattttgacatactagctattacaaagacccgctatatcacacaacttcatacctcttgcaacacatcgcgctttccaacagtttggctgtatgtacataccaatagataacacgttcttctgaaacattatgatgactgattatataaatatactctcgctgtttct

SEQ ID NO: 30924 - DNA, 210 bp, Glycine max
cgattcccggtcgaccacgcgtccgccacgcgtcgcgacagaggggtgtgggggttgaaacggttatcattttaggggggataattggctggggaatgaaccccaactatgaagatccgtggatagtcttgtactgtacaacatgcctatttcccacaaatttggatggaagattatgaccaaaccttctaattactacttgcaaagatt

SEQ ID NO: 30925 - DNA, 409 bp, Glycine max
  modified_base (8)..(8): a, c, g, t, unknown, or other
  modified_base (42)..(44): a, c, g, t, unknown, or other
  modified_base (75)..(76): a, c, g, t, unknown, or other
  modified_base (111)..(111): a, c, g, t, unknown, or other
  modified_base (157)..(157): a, c, g, t, unknown, or other
  modified_base (298)..(298): a, c, g, t, unknown, or other
  modified_base (329)..(329): a, c, g, t, unknown, or other
cggaattncccgggtcggacccacgcccgtccgtaccggctnnngcgagaagaaacgacagaaggtggactatgnnagaaatttccaattattagcttttccgttcataantttctgggcttaggatgtacgagattgtagcttgcttaccatacanctgtgctaatagtatttgctttggtgacagttcattaaggggacgcgtgtcgtttaatgggcgttactctgataacttgcacgggaggcgtgtaacaaatgaatgcgtatacgtaatacattgaagcgggcgtctaacatnggatcggtccaacaatggtaaccatcacatngggtctgaagaatcagcttgtgttttataggttataatctatatgatagtttgtgcgaaatatcttttagctttttttaa

SEQ ID NO: 30926 - DNA, 273 bp, Glycine max
ccactcgtacgttctgttcgagatttctatttattgggacacaagcgagtttgttgatcgggataactagaaacagggcggtgaaaatgaaggtccttgttttcttcgttgctacaattttggtagcatggcaatgccatgcgtacgatatgttccctctacgaatgaacactgactatggtgcccgaactcctgaggtgaattgctcaagttgcaagcttgctagtgaatcacacagcatctttggctttgagaccatctcttgagagtgcg

SEQ ID NO: 30927 - DNA, 280 bp, Glycine max
gactgggaagtgaggtttgtttgtgtgtccaacaaggcgaatcgcgtggctgataggctcgccaacgatgctcggaaattggcttgtgatgatgtttgtgaggagtatcttcatcccccggctaactgtaaccagttgctcttggaggatgagataggctgtgagagcttttagtccttttttttttttttcttcttctttcaaacataagaaaagaaaaattactatcacaaggtttttgaaggacaccatcggctacttaattaattggcaatcatgg

SEQ ID NO: 30928 - DNA, 385 bp, Glycine max
  modified_base (1)..(2): a, c, g, t, unknown, or other
  modified_base (57)..(58): a, c, g, t, unknown, or other
  modified_base (130)..(131): a, c, g, t, unknown, or other
  modified_base (170)..(171): a, c, g, t, unknown, or other
nngggagatggcggggttgaggtactagttgaatccatggcgcatgtgcggcttgcnnatttgcaactacaacatgctaacactgaggggctgccaaatgttggagaaagacaaaagtttgctagctccnngtaagtgtaacccttaatctccaataagcttaaggttanntgcgggggtttggcggttggttctggaagtggcagtgagtgtgaagaaattggaattggaaggggttcgggcgaagttcgaagttcttcttcttctgaggaaggaagaaaggaggcagtgagtgtgcagtcaaaaagtgacttcagaaagtataccttcgacgtgagtattggaaatccagttgggaagtttgtgggacggattgtgattggac

SEQ ID NO: 30929 - DNA, 343 bp, Glycine max
aggcgtacgtgacgacacaagggaacgactgactttggtagatgagcttctaccctagggggtgggctcaacattcggcagttctggaacaataataatggcgtcctgcaataaggttggaaaccgttcgaggcatggtgctgctcggaaacacatgcgcctgtgcagacatgctatatacatcgatgcacgattggagcacgctttcattggaggcctcacatatggagtcgatgaccattctcatcaagatgcattttctggcttctgagatgtggcttatgcgaaagttataactcgactgaaacagtggcagatcaatgggatttggatttgtcaactt

SEQ ID NO: 30930 - DNA, 178 bp, Glycine max
  modified_base (17)..(17): a, c, g, t, unknown, or other
gcgagaagacgacggcnggggagagcgtatatggaaatcaaacagcagatagagggtctagcatacgtgggttaaatgcatgcgcatgagtcggaagaatttgtgttagcggtgaggagatatattgagaattaacatttgatactgtatatatggggaggggaagagcggatttgaa

SEQ ID NO: 30931 - DNA, 382 bp, Glycine max
  modified_base (291)..(291): a, c, g, t, unknown, or other
  modified_base (315)..(315): a, c, g, t, unknown, or other
gaggcggtccattccatcattctgggttgaacgtgggcactgtttggtcgagtttattttataatttgattaatctcttttccgaaaagaagacatcttttcgttttcttttcttttcttttttttccccccttgaataagagcaaataaagtagcaaacttttcgttttcaaaagatagtaagctcgtgaaaaagagaaaataaaaattaattgaacaatgttaggattttcctgcgcttagtctttgccttcggtaatagcatagcgtttaaagtccgaactcatcagntttctctctctttctgcttttaantgatatcagtcgctttcttgatgaagtagtagtaatagtatgggaatatatttttgttaattatgta

SEQ ID NO: 30932 - DNA, 432 bp, Glycine max
gagacacgaggggctttggttactgcgctgggtgcggaaccagagaaggagagaagaatggacgaggagaatggttacagtgggagtagcagctcaaacttggagactacaaaagcagagagatctgtgtggctgatgaagtgccctttggtggtggctaagtcatggcaggctcatcctccttctcaacctctcgccaaggttgtgctctcccttgatcctctccaccctgaagaagacgatccctctgcagtccagtttacaatggagatggctggctccgaagctgtgaatatgccaaaaacttattcattgaatatgtttaaagactttgttcctatgtgtgtcttctccgagactagccaaggtggcaaggttgcaatggaagggaaagtagaacataagtttgatatgaagccccatggtgaaaac

SEQ ID NO: 30933 - DNA, 436 bp, Glycine max
gggacaaaaggattgatcgcgaaaaagatttcttgttcttattagaagatcgtgattggatccacatatgtttggtaaaaagaaagaaaaatattcttctttgagaataataaaaaaggaaagtgttcaattggaacatgaaaacgtgacagaattggtcctagttactcttcggaacggaatagaagaaggggagagattctcgaaccgaactaggaaacggatccaatgacttcaaaagaattgaacgaggagccatatgaagtgaaaatctcatgtacggttctgtagagtggcagtaagggtgacttatctgtcaacttttccactattacacccaaaaaaccaaactctgctttacgtaaagttgccagagtacgcttaacctctggatttgaaattactgcttatatacccggtattggccataatttac

SEQ ID NO: 30934 - DNA, 364 bp, Glycine max
aagatgacattagggataattttcaatagatttttgcaaaggaaattgcttgccacaataactaataagtgaacctttttcatccagaacgcactacttgcaattgttacttaaaaggatattgagaagggatgagatactactagttattattacatactagaaaggcaaaagtaactattttatgcttgcattgttttgtaaatgcctccttgtagtctccgtgatgtcctgctgttttcttctcaataaatcttctatttcatcctggtattgttgttcaatcatctctaactctattctcaactcatccccaggttcaaagaaggaggaagtactaacgggatgacaagagaaattcatc

SEQ ID NO: 30935 - DNA, 422 bp, Glycine max
  modified_base (19)..(19): a, c, g, t, unknown, or other
  modified_base (48)..(48): a, c, g, t, unknown, or other
accggccggaattcccggnccgaccacgcgtccaggcgctggtacagntgcgaaaaaggcgacagttagggggtagacaaacagaggagcccggagtgcggatcctctcttctcttctttgatctccgataccctttttgatatctcaacagagagagagagagaggatctgttgaagctcaagggattgagaagtggggggagtcacagagagctgcgacacctgcgacggcgcgtggcgtatacgaagacgaaagaagcgcaatgttactgcgatggctggttgctcagacaccatggaaagtgtgtgcctgaatagctcaaaactgaaagagcgcaactacatggggttatctgattgttcatctgtggacagctccgcgccgtccttctcagatgagactaagagcaattgtgataca

SEQ ID NO: 30936 - DNA, 377 bp, Glycine max
cgacgcgtcagctgatgccagaagcgacagtaggcgtgtgaccaaagtgtgatccatccacgggtgggaaactcgacctttggcatacagcaattctactttaattaacacttcctatctagagtgtttgtccgatccatgacccattgcccccagccacctcaaaatttgcagtgccaatagacttgaataagaatccatgggaacaaaacgctactctccataaccgatggcaccctcacataccggacgtagctgcttgtaataccggagaagtcttcacggtagagatggtagattggacaagaagtgctattaaagacaacgattcatcactagacataaaatttctagacctctcaactgtccattatctt

SEQ ID NO: 30937 - DNA, 282 bp, Glycine max
ggtggaagtgaaggaggagagggagaagaagaagaagtaggaggaagaaaaggggaaaacgcaaagaaaaaaagaggaagatagatcaagatctcccttgcgtttgtctcagttgaagaaattcaagagcagaacgagactaactcaacggtatcagacgtttcagggtttcagcacttccatttttttttttccggatttgagttggaagaagatcaaagaggttcctagttgcttggattgttcctctgggtggtggagactttgtgtatttttaaaata

SEQ ID NO: 30938 - DNA, 155 bp, Glycine max
ccacgcgtacgcacacatgcgatattacgatcgatgacgcaacaaatcttatcaggaactgactctttcttacatttgccactgtcattctcagccacacacatattttgatacatcatggtatacaaacctctatcactgatgaactctatgtc

SEQ ID NO: 30939 - DNA, 303 bp, Glycine max
cggtcttgaatttccgggtcgagccaagccttcgcaccggttccagaagaccaccgaaggggatatttaagacgatgctagaaggaactgttgcgggaagtacgaggcatagctgcattcacccgattgttatcaccaaaaccatctacatggctttccattttgagctattaaagattaatgcctaggtcatccaagttgatgacgacattgaattgatcgagacttcatgcttgtgatacttgacttcaactgatctctgactacaacctagcctgtcagctgtatatctacacctagttt

SEQ ID NO: 30940 - DNA, 438 bp, Glycine max
tgatggtcgaggagaaatttcagcttcggaatctcgattaatcgaatctcctgctcccggtattatttcgagacgttccgtatatgggcctctccaaacaggacttattgctattgattcgatgatccccataggacgtggccaacgagaattaattattggagacagacaaacgggtaaaacagcagtagccacagatactattctcaatcaacagggacaaaatgtaatatgtgtttatgtagctattggtcaaaaagcatcttctgtggctcaagtggtgaataccttacaagaaagaggagcaatggaatacactattgtagtagctgaaacagcggattcttcagctacattacaatacctcgccccttatacaggagcagctctggctgaatattttatgtaccgtgaacgtcacactttaatcatttatga

SEQ ID NO: 30941 - DNA, 391 bp, Glycine max
cttctttttttttttttggaacataaataaaaggcagcaagtggcactgcatgtatctctaaatattcaataacagattatactcaatacaattggatgggtttcataaaataaacaaaaattacgtcgccttacaagcgtgatcctctaatatactaccaaattcgccataaaattctcatcctatatggaaaagaaattggatcaaaccatcagaatgacaaacaaaaattgccttatcaatcctcatgcaaagccttcatcaaatagagtctgttaaagctttgccctgacaccccattgatttggttgcagtagttggaaatttgatttggtatgaagaagctcttcaaccgtgaaggctctgggagcggcttgaaaatgggatttg

SEQ ID NO: 30942 - DNA, 419 bp, Glycine max
acgccaggacgacggccacagaatcaaacacgaacacttatagacaattcgatgatatcatatatccttcgataactaagatgcatgcataactttagcgcttaaacattaggatccatatcactgtcaaacagctccacatttgacaagctgataagaaatcatgacaggcgtgattgtaaaagactataacagcgaaagctaagacatcgatcatagaaattggatataatcgaatgaccgtaccaaacttgatatcgtcaaggtataaacaaccttatctagatgatatatgaaaagtgattggattctaggatagcgagattaaaagtggtcaccgaatgcatgattgatctatgacattctgacagatagacttacgtatgatagaatgtatagcatatagctgagttactgat

SEQ ID NO: 30943 - DNA, 137 bp, Glycine max
cccaagccgcccgaccggcggcaagaggccaccagaaggggaaggagaaaggaggaaaaaaaaaaacaaagggaaaaagaaaaacgcgcccgctcaagaggacccaagcaaacgcccccggccagccaacgccaaac

SEQ ID NO: 30944 - DNA, 392 bp, Glycine max
  modified_base (104)..(104): a, c, g, t, unknown, or other
agtttagacacgacctctgattttcattgaccaacaccatacactggccaagtgcgcataatctaaggaagagttcttttttgatagatattgtcatcgcttcnactaagaacatcacactgaagagttccgacggcgaggccttttaggtggacgaggcggttgccgtgtagtcccacacgatcaagcacatgatcgatgacaactgcgcctacagcgaaattcctctccccaatgttaccaacatgattctcgccaaggttatctagtattgcaagaaccacgttgacgccaattgcgcttatgagaagcccactgaggatgaactcaaggcttgggactcttatttcgtcaaagtgatcaggccacactctttgatcttattctggctt

SEQ ID NO: 30945 - DNA, 320 bp, Glycine max
  modified_base (308)..(308): a, c, g, t, unknown, or other
aattaagagcatagcaaatatcgaaatccttcaaataaagcttaacctatatgaactttgatgtagacctatttgtttgaaacacgtctttggaatgaccgtttcacggaagcataatcctgcgtatggatgatgtttgtaaattgtaaacattgttcaaaacaatatgcaagactagccttattctacatggtatcacgattccagtgtaggcatttacaagatgaaacaggctataaaaaccaactgccatagatgaagcatctagtttgagcagcacccaattttcttcaaaacggaggaatcgnctttcacattta

SEQ ID NO: 30946 - DNA, 215 bp, Glycine max
gaatccgatcgatttgaacgcagcttcttcttggtttgttgaaattttggcattaaatggtcggaattcggcgttgggattagcttagggtttcaaaaaaataattctcttttttttctgtctaattgtgtgttttttaatggaacctcgtattgggaataagtattggcttggccggaagatcggtatgcggatcgtttggagagatctattta

SEQ ID NO: 30947 - DNA, 261 bp, Glycine max
gaatccgagggatatgaacgcagcttcttcttggtttgttgaaattttggcattaaatggtcggaattcggcgttgggattagcttagggtttcaaaaaaataattctcttttttttttttctaattttgttttttttaatggaacctcgtattgggaataagtttcggcttggccgtaagatcggtagcggatcgtttggagagatctatttaggtactaataatcaaaccaatgaagaggttgcaattaagcttgaaaa

SEQ ID NO: 30948 - DNA, 369 bp, Glycine max
atgctctgtgtgtgcagatggaattctcgtttggtccccgaagatggttgcctaaagaattactgcaagacagacgtgctgatgatgatgttggtaacaatgaaaattatgcgctgggattgcatgctcctggtttttttgataaaattctaaatgttgacaactgcttactgcaatctcatcctgctaataagggacttgcagctgtccaagaatgttggagagatccacaacttggtttttctccctacagtgttcattcacacaagggatttcttaagcatttgatgctgagaactggaagggatgtaacaacttatcagcctgaagttatggtcaactttgtgacctcttcctacaagcctgagc

SEQ ID NO: 30949 - DNA, 343 bp, Glycine max
acgcacgcgtccgagatgtctcacaggaagttcgagcaccctttgcatggttccctcggattcctccccagtgagcgtgcatcacgccaccgcggcaaggtgaaagcatttccgaaggatgacccatcaaaagcccctcatcttactgccttccttggttacaaggctggaatgactcacattgttcgtgaggttgagaagccaggatcaaaactccacatgaaggagacttgtgaagctgtgacaatcattgaaactccacccatggttatagttggagtggttggttatcttaatacaccacgtgtccttcgctctcttgccacagtatgggctgagcatt

SEQ ID NO: 30950 - DNA, 309 bp, Glycine max
cttcttgaaaggatttttgtactggatcctgaaaagaggatgaccgttgctcaggcatgaagtcatccattcatcacgggcaagtgaattatgatgctgccttatgatctattctgaaatagcccatctaatccttcggcatttttctttcttttccctgctgtactgaaccatgagcattgtttccaaattcgcaacgtggataaagcgtggggcagtcgatttaaagaccttcctacatggcagttcttatcagtgggatgtgttctgttctcttggtttcgttcagggctatgatgataacaccca

SEQ ID NO: 30951 - DNA, 367 bp, Glycine max
atgctctgtgtgtgcagatggaattctcgtttggtccccgaagatggttgcctaaagaattactgcaagacagacgtgctgatgatgatgttggtaacaatgaaaattatgcgctgggattgcatgctcctggtttttttgataaaattctaaatgttgacaactgcttactgcaatctcatcctgctaataaggtacttgcagctgtccaagaatgttggagagatccacaacttggtttttctccctacagtgttcattcacacaagggatttcttaagcatttgatgctgagaactggaagggatgtaacaacttatcagcctgaagttatggtcaactttgtgacctctttctacaagcctga

SEQ ID NO: 30952 - DNA, 405 bp, Glycine max
  modified_base (349)..(349): a, c, g, t, unknown, or other
ggtgaataacctcggtactattgcaaggtctgggaccaaggaattcatggaagccctggctgctggtgctgacgtgagcatgattgggcagttcggtgttggtttctactcggcttatcttgtagctgataaggttattgttaccacaaagcacaatgatgatgaacagtatgtctgggagtcccatgccggtggctcatttactgtgacaagagatacatctggtgagaaccttggtaggggaacaaagataactttgtttcttaaggaagatcaacttgagtatcttgaggaacgccgtctgaaggatttgataaagaggcattctgaattcattagctatccaatntctctctggattgagaagactactgaaaaggagatttctgatgatgaggatgagga

SEQ ID NO: 30953 - DNA, 482 bp, Glycine max
tactggaccggaattccggggtagacccacgcgtgggtgcgtgagggcagacgacagaagggtgcagcggcgcgcagaggatggggccgagtggtggagtttgaaagagaacatattgatcgcagttgagttctaaggagtctcgaatacgattacctgttcaagcttctgctaatcggagactcttccgttggaaaatcctgcttgcttctcatattcgctgatgactcctatgtcgacagctacataagtaccattggagttgattccagaatcagaacggtggagctggaagggaaaaccgtgaagctgcagatacgggatacagctggacaggagcgattcatgactataacatgcagttattatagaggagcacatggaattatgattgtctatgatgatactgagatggcacggtttaaccatgtgaaaccgcggttgaatgagattgacatacatgcgaatgacactgtgtgcaa

SEQ ID NO: 30954 - DNA, 325 bp, Glycine max
gaattccagggtcgaccgactcgtgcgtaaagtcgactaaatgcttcagaaagaattttttgaaaagcttgctaacaacaacgctcgggctatactcacagacagtgctctcagaaatgtcaagattcctactggacctacacattcgattcttgaccatataccaagagactcggatttgaaacataagctcagacacctacagagactgatatgaagagtaagctgtctcagaactttgaactccatctaacaattgatagtaagaagcttcagatccaaatgaattgtgcatatcattgatagctagctctgatcaattgtt

SEQ ID NO: 30955 - DNA, 134 bp, Glycine max
acgcgttagaacacgactgataccactatttagtacgaatgtcagaccacgacacagtggccagctatacttaatttcgaacctgataatcaactttaattacataaaacgtctatactttaaatctctacatt

SEQ ID NO: 30956 - DNA, 319 bp, Glycine max
  modified_base (129)..(129): a, c, g, t, unknown, or other
acagcatacgacacgagaagactacagattgttttactaacctacgccctacgggttagcgatacctgaacgaagaggttcaagatacacgaacgatctagctgcacgtcatgaccgatgcatagattnctcatgaacctcgattgtgccctaacgtactctcagtcacaatagacaccgtcttagtcgtcttcacaatcaatggcaccgaagcagaccatggctgagaacaagatcgcttacgatgcgaagctgtgcgacctaatggaggagtacggtcagatccttggtgtgaacttcgatcacgtgggatcgaacc

SEQ ID NO: 30957 - DNA, 346 bp, Glycine max
ggttttgttttttttttggctaaaagaaatagaaattttactaatgttaaaattacataaatatggcaaaagaaaaggattgtttttgtatcactgcataatctcgatggctagacttctaaacaaacaccgcctattataaactacattccttatggtacatagtacaacccatgattccagaacaaatgatgagataaaaaagcccagaaacaaggagcagtctggtatccacattaaccccccattcacctttgttcctcatcatggggtcagaacaaacaatttggatctctgatggctcttaaccacctgcagttgccaattgattagcactggtagcaat

SEQ ID NO: 30958 - DNA, 310 bp, Glycine max
gtggcagtggataggagattggaacatatgttgaaaaacttttgacaagtgagctttctggaaatgtcatagatatctggcctgtgggagctctcacgtcaaaacctttggcatttaaggcccggaattgggagttgaagggcacacagaccattgatgttactgatgcagttggatccaatattcgaattgatagcacaggacctgaattgatgcgcattgatcctcgtttaaatgaggacataaatgaagaatggatttgagacaaaacccgattttgttatgatggtttgaaaaggcagaggttaaa

SEQ ID NO: 30959 - DNA, 408 bp, Glycine max
gattggatggatgtcatctcttcccaagggttgtccttactttcagttgatgttgctggttctcaggtgacagatgatggattgcgactcctaaaggattgctcaagtcttcaagcattgactctcagttactgtgaccaattttcagaatatgggcttaagcacattagtggtctttcaaacttgacttccttgagtatcaggaagagcagctctgtcaaacccgatggaatgcgtgctttctccaacttatttaatttggagaagttggaccttgagaggtgttcagagatccatggtggatttgttcatcttaaaggtttgaaaaagctcgagtatcttaatattggatgctgtaaatgtgttacggattcagacataaagtctatctcagagcttataaatttg

SEQ ID NO: 30960 - DNA, 243 bp, Glycine max
aatgacctctgatgggggttcgtatgttctcggggacggtgatcaccgtaaagtgagcaccatcttagctgaacacctctaaaggactctgactcctgatacccatgagtagcatattgcggccgacctttttctacaaatggtccatgatcatgagcatgtatttgatgatgaagtataagatgtcgaacttgacgaagattttgaccttgataatgccttaaaacgttattctacttttat

SEQ ID NO: 30961 - DNA, 384 bp, Glycine max
  modified_base (6)..(6): a, c, g, t, unknown, or other
  modified_base (125)..(125): a, c, g, t, unknown, or other
  modified_base (199)..(204): a, c, g, t, unknown, or other
ccgggncgacccacgcgtgacgcacggcctccataagctacaaaaagacgttttagtgtattttattgcatcacacacacggccacatagggaattctcttgcttttatagcaactttttttgcnttgattactcaaacaacacttagtgttcttaggttattattcttgattgacttcctaaaacattctacttttgnnnnnnaattatttgagctcctatcacaatttccctccaacaccttaatggtttcctttgcattaaaacttcacacttcacaactgacacttattttgttcatttgattcgtttaatattctcaaaaacccatcattgattgaacttgcaaactatactcatcggaactagcttttttggttttct

SEQ ID NO: 30962 - DNA, 453 bp, Glycine max
gctcgacccaagccttccccaaccttctaccgtttagaagccaccaaagggcaatgcaagggcgcctagggggacaagagagttatcacctacagatactgcttcgtgcactcactgtcagatgctcgtggtttggattcagaatcaactaacacaaaagacgaccaaggagatagtattcaactatgtaaatcacctgtgcgagagcttgccaagtccaaatggagagtcagtagtagactgtaatagcatttatggattgccaaacatcacgtttactgttggagacaaacctttcaccctcacccctgagcagtatattctgaaaactggaaaatgcattgcagaagtttgccttagtgggtttattgcttttgacattcctcctccttaaagtcctctctggattcttggcgatgttttcatgaaggtatatcacaccctctttgacta

SEQ ID NO: 30963 - DNA, 138 bp, Glycine max
  modified_base (9)..(9): a, c, g, t, unknown, or other
accgggttncgaacaggcaagacgcccaccccctcctactctttctaaaagactttataaggcttataaagagacatctttatcgtcattttttgaacacatttacagcacattttacaccaccaaccattctttctt

SEQ ID NO: 30964 - DNA, 349 bp, Glycine max
  modified_base (34)..(34): a, c, g, t, unknown, or other
  modified_base (212)..(212): a, c, g, t, unknown, or other
acccccgtggcgacccaggcgtgcggcaggcgtnagtacgactacagaaaagacgattttaaagggtatatatatcaactgaatccatgattattcagtaatcgatctattctgaatggtgtaaataatcaatttgttattgtaggaaaaagatgccgcattatcactcaaataacaacaacgatcttgcgttcttcacgtacgatgagaancgaaatctatgttatgggacccagaaagagaggttgggcaaggactccattaagcccttcgatgcttgctctctctgtctcaaatccctaattgatcctatgagctgccagaaaggccatctcttttgcaaagagtg

SEQ ID NO: 30965 - DNA, 262 bp, Glycine max
  modified_base (44)..(46): a, c, g, t, unknown, or other
  modified_base (105)..(105): a, c, g, t, unknown, or other
  modified_base (123)..(123): a, c, g, t, unknown, or other
ctaatcttcaaaatttaattaacaattttataaaccctttttgnnncccattttcatacatttacccatattatattttttatacaccaccttacaacaacttgntatttcaaattataactnccaattcactcttcaaacccaacttgtcaaactttcctaggaaattgaatgtgttccttgttttatcccattatcttttttaacatccccacattaattatctttcttacattccttcaaacaaaggattacctttttt

SEQ ID NO: 30966 - DNA, 438 bp, Glycine max
ggcgtgacggccagcgcgtccacacggttgcgaaaacaccttataggggttgtcctaatgtaacacaccgggccaattgggaaaatcgtcatgtggtgctaccttatttaccaaaaattctcaagggcctcaataaggttggatcgactagtcctcaaagtggaatggacaatgtgagaaaccctgttggtaaccctcttgcaggcattgacccagatgagattgttgatacacgaccttacaacaacttgttatctcaattcatcactgccaattcacgcggcaacccaaccatgtcaaacttgcctaagaagtggaatgtgtgcgtggttgtgatcccatgatctgtttgagcatccccacattaatgatctggcttacatgcctgcaaacaaggatgggcgttttggattcaacttacttgttggtggtttcttc

SEQ ID NO: 30967 - DNA, 424 bp, Glycine max
  modified_base (61)..(61): a, c, g, t, unknown, or other
  modified_base (69)..(69): a, c, g, t, unknown, or other
  modified_base (72)..(72): a, c, g, t, unknown, or other
  modified_base (299)..(299): a, c, g, t, unknown, or other
cacgcgtgaccacggccttcttacgactacaaaaagacgacttaatgggggtttgcaaaantaaaaatntgntgtctatttgggaaatgtgcatcaacattctcaacctcttccacaacccaacaagtcactcaaggtattgatggaaccgccctcacctccatcgtcacaagagcaacaagtggcctttgtctggagaccacccgggttcttgcattgcgcggtgtccatgttgttatggcagtaaagagtcttgacagtggtaagaatgtcaaataaacaattcttaatgaaatccnctcggttaaaattgatgtcatggagttagatctaaactctatggcatcggtaaagaaatttgcagcaaattttaattcttcttgtctttcactcaatatccttatttaagaacttttaactctat

SEQ ID NO: 30968 - DNA, 127 bp, Glycine max
  modified_base (102)..(102): a, c, g, t, unknown, or other
  modified_base (105)..(105): a, c, g, t, unknown, or other
tatttctcccaaccaattaccctctgtcttcccaaagattctatatttatgttccttgcataactcgtgcttgtggccttccacaaaataccatctattttnaanatactaactaaaatgttaatcc

SEQ ID NO: 30969 - DNA, 116 bp, Glycine max
  modified_base (36)..(36): a, c, g, t, unknown, or other
  modified_base (45)..(45): a, c, g, t, unknown, or other
  modified_base (108)..(108): a, c, g, t, unknown, or other
tctttctattcccatcaccatttatacattataaanactgtttanagcattcatatctatcattaagtccttcaaatattttaaagttactctttatcctggaaacgngttatcac

SEQ ID NO: 30970 - DNA, 345 bp, Glycine max
  modified_base (48)..(48): a, c, g, t, unknown, or other
  modified_base (174)..(174): a, c, g, t, unknown, or other
  modified_base (275)..(275): a, c, g, t, unknown, or other
ccaggcgtccgcccacgcgttcgtggactctctaaaaccacataaacngggagtatcttgtatccataccacactgggagtgtgccatagggatgtgaagcctcaaaatcttttgggtcatcctcttactcaccaagttaagctatgtgattttgggagtgccaaagttctggncaagggtgaatcaaacatttcatacatatgttcacgttactatcgggctccaaaactaatatttggtgcaacagaatacacagcttttattgatatctggncagctgtgtgtgttcttgctgaacttcttctaggacagtcattatttcctggagaaaaccaagtggacca

SEQ ID NO: 30971 - DNA, 476 bp, Glycine max
  modified_base (205)..(208): a, c, g, t, unknown, or other
ccgggcgacccacgcgtacgaattcgagcgtccggtttttataagactctttatggtaatgtagattgatcctaaaacaaatgcaacattagatcagcgacttgcttttatagcaactttttttgctgggattactcaagcaacacttggtgttcttaggttaggattcttgattgacttcctatcacatgctgctattgttggnnnnatggtgggagctgctatcacaattgccctccaacagcttaagggtttccttggcattaaaactgcacacttcacaacggacacctatattgtccatgtgatgcgtttagtattctcaaaagcccatcatggatggaactggcaaactatactcatcggagctagctttttgggttttcttctggttgccaaatatattggaaagaaaaacaagaaattcttctgggtgccagcaattgctccattgatatccgttattttatccactt

SEQ ID NO: 30972 - DNA, 305 bp, Glycine max
gcaggttgaaaggagagatcaacagaactggaaccaaggtcaggggggacctatgcagccatccactgcaatgaatggccaaaactttgcttccggtggagagcactaagaaatgcttaataggaactctgctttagaaatcatcacacatagaaaacagaaccatgtttttcttatgggggagtgatgatttaaggttctgaggtcatattttacttatgtcttttttgtgtggagaatggctgtgcctgaccatgaaggactttgataaataatatacgctcataaagttaatattttacttt

SEQ ID NO: 30973 - DNA, 231 bp, Glycine max
  modified_base (73)..(73): a, c, g, t, unknown, or other
tgtcataccgacaggaagaaaattaaaacacatcgcatcttttaaaagacgggagcgccaccacaccaccatnttcttaccactcccccaacatcctcatcacaacaacattatgtttactatcaaacgataacctactatatttcatttcacaaaaaccaaccaacttttaatctaaccccattctcctatctgttaacactaaacaaacctacctccacaaatttcaaa

SEQ ID NO: 30974 - DNA, 349 bp, Glycine max
  modified_base (26)..(27): a, c, g, t, unknown, or other
  modified_base (52)..(53): a, c, g, t, unknown, or other
  modified_base (67)..(68): a, c, g, t, unknown, or other
  modified_base (76)..(77): a, c, g, t, unknown, or other
  modified_base (97)..(98): a, c, g, t, unknown, or other
  modified_base (129)..(131): a, c, g, t, unknown, or other
  modified_base (142)..(143): a, c, g, t, unknown, or other
  modified_base (154)..(155): a, c, g, t, unknown, or other
  modified_base (167)..(168): a, c, g, t, unknown, or other
  modified_base (178)..(179): a, c, g, t, unknown, or other
  modified_base (189)..(190): a, c, g, t, unknown, or other
  modified_base (197)..(199): a, c, g, t, unknown, or other
  modified_base (213)..(215): a, c, g, t, unknown, or other
  modified_base (224)..(225): a, c, g, t, unknown, or other
  modified_base (243)..(245): a, c, g, t, unknown, or other
  modified_base (283)..(284): a, c, g, t, unknown, or other
gggattggctagatgttcttgggagnntagaagttttcaagggcgagaccannttgctggcaagtannttcttgtnntggtagttacctggtgcctnntctccaatagaggggtggcttgggttcaccnnnctcatacttcnncatagaagacnnttggatgaactnnttctacactnntcttcaggtnntcctttnnngtggctgtggaccnnngtgaaccgnngggtagtgaaagtaattnnngcagcttggaatgacccagttaatggattggacctgcnnattttggtggttcccgacccaccacagcaaccagagcttattcttgtaatcgagaagttgttttc

SEQ ID NO: 30975 - DNA, 307 bp, Glycine max
  modified_base (26)..(26): a, c, g, t, unknown, or other
ccggggcgacccacgcgtcacccatntcttacaacacctcccagaagttttcccaacgggggaagaggactaaaagaaggcatattttaacgaggagtgagagataacaaaacactaattctgagagagagtataataaatgaaagaaaaaagaagttgctgctaacaaggatatactgtgatgcctactctaataattcatggatatgccttgcttgtttcatcttgtttcatcatccttataacatcctcacaaacagatccttcaaaagtaaaatcacttatagacattaaaaaaaagtttgat

SEQ ID NO: 30976 - DNA, 332 bp, Glycine max
ggttgagtggaagtggaaggtgaagaagaagaatatggaggatttcaagaagagaaagctggagctggacgaagcacgtggcgacggtgatttttcttccaaggaagagcttcgcttactcatcgaacctctcgctaaaccccagctcgtcgatcttcttgccaaactgcatttcaagagcatggagaaattgaggaaggagctgagatctatgataaagggacaggaaaatcccgtggctatggatttataactttcaaaaatatggaatcaactcagcaagcattgagagcccctaaccagttaatcgatgggagattggctgtctgtaa

SEQ ID NO: 30977 - DNA, 428 bp, Glycine max
ggacgcgtgggcagacgccttgaccggttccaaaaaaacaacgaaagggaataagaggaaggaattattaataaccatggcaaggagaatgaccaacgccagattcaagaacttaagtcgaaaccgcataatttaacgatccgtgggttactctcttcgactccgctccggcatgggcctttccagtggcaaacactatattcccgacaaaccccttcccatgaatgaggaactcctgtgggacaacagaactgcatttctctaacagagtatagatcgtattgctgacactgtcagaaagtatgatgcattggcctgcctgtgtgctggattgaagtatttcgcgtcgctgggattgatggctgtgtggaatgacaaagcctccaagacaccagttgcacccaaagtatatccatatgacaatctgg

SEQ ID NO: 30978 - DNA, 246 bp, Glycine max
agaaaaagcaaatgcttttattcaagagaaacaactgtgcattacatttgatactgctctcaggactatcaagaacaaagagcatcatcatacagttgacgaaggtgactgcaaaggtgatgtcaagacagccaatttttcagcaaaaaaaccagaaataaaactgataacttcccattgaacacaagaaacaaatgctttttactcatgagaaacaacgagcacttgttttccaacattgcgacc

SEQ ID NO: 30979 - DNA, 391 bp, Glycine max
ctctcaacacttttctgagttctttctttgggggttgggaaagcaaaattttaggtcaaagttggttaacagttcacttgtatctgtaccactcactggaatcgttgcagctgtctattcttttccattttaggttccgtgaccttacagataattaacatatgccaaatcattatttggttttgaactttggtttaggtagtattttttcactcactttatatttgtgtttatctttcttttttatccatcttataattttattcatttaccttaatataaatggaatataattaaagagtaaatactagtgtatattctgaaagcaaaaaatatatatatattacactactatttgctatttagtcacaaactatatatcatttacgat

SEQ ID NO: 30980 - DNA, 377 bp, Glycine max
ctattatacatgtgtgaaaggcacatcagccttcaagtgagatattatgacaattaaatttacaatcataatagaaaataagattcacagtctatatatccttttgcagtctacttctagatatcttatcccagagtacacttcaaaattctaaagttttatacaaacaataatatgaatttaatcacttaaggtcctctaaaactgtaagtcacctaccaagtaacctctgaaagcagcttgtgcctttgatgctgcttcctcctgcctgattttctctggatcaggtggtgcatccgtatcaacagatccattaatgtctctttcttgattctcaagtaaaatattttctgattcttcattctccagttcaaggt

SEQ ID NO: 30981 - DNA, 329 bp, Glycine max
gatgtatgagaggtagcatgtgtgctatggtgggcacactgaaccatatttgtcttaccaaaactgtggacgagatataggatccacgcttactaacgcttgcatacgacactatagcgcatcgatggacacaccataatactattcacatgacatcttacatacaacgtccatgactgggagatactattgatgttacctaactggactgcctagcatgacattcaaggttactccatactagcgtaatagcctaagacagacagcacctagtcgcccttcccaacatgtgcaccacctgaataactaattggactcgcactgtatct

SEQ ID NO: 30982 - DNA, 389 bp, Glycine max
gagacacaaaaatgttgtacaaactgttgtatgaaatgttaacatttctctattaaataaaataaaccaaaatagaaaccattcaaagttccctggctcgtttttagatcaaaatcttactatcttacactgtaacaaacactaaacattaacccagaagtaataaaggggaataccaaaaagttggctcatttatccccacaaggactctatggtatttagggtgacatttaaggagggacttgaggtgggatcaagggcaagatctgggtagcaagcagattcctcttgtgtaggcctacagcatatcctgtcaaaagaaactccttcctcaatgttgtcatggacgaatcgaacaatgaaagtgcacgtacactttgttggatcat

SEQ ID NO: 30983 - DNA, 303 bp, Glycine max
attcccgggtcgacccacgccgtccgcctgcctgccagatgagcgaagaagagggaagggggacggtgcaactgaaagtgctattccggggtgggtgttggtcactttagctgatcataaatattagatgcaaatgttcaagaagcccatcacaaacattaccatctcaagggctgaagaaaacacttaccccgacacctttgaaggggctttggatcattacatcataagcttggtctttgggatcggaacgttcagctattgcgtttactatcgcaaggtcagccgctactgagctgacga

SEQ ID NO: 30984 - DNA, 392 bp, Glycine max
acgaccgaagctgattaatacgcagagtggatgtcactagggagggaaatcatgtattgtcgcgctgagatgggttagatagagaactctaccgcacttacctactcaggtctagtgaagagacatgaagaaatacgataagcgaaccagatgcactgattcgcttgcctcttatccaaaaggtgctgaaccagcccttcttacagaactgatgtccttaacatgcttgtcaaggagtgcccggtgatgctgaggattctcttaacgaacgactggtctataattagtgaagattttgaggaacactagtgtcgctacatgtctggaagtgaatacactgagacgcttatgcacggatcatcagaacttgctgaaagtgctgacatggagaa

SEQ ID NO: 30985 - DNA, 451 bp, Glycine max
cggaattcccgggtcgaccaacccgtcctaccggttgcaaaggacaccagagggggaggccattgttaatatagttatggagttgtccaaaggaggggaattgctagataggattctttccaggggtggaaagtcctcagaagaggatgccagagtagttatgatccacatattgagtgtggtagctttttgtcatctgcagggtgttgttcaccgtgatctcaagccagagaattttcttttcacttctaaggatgacaagtccacgctgaaggccattgattttgggttgtctgactatgtaaagccagatgagaggttgaatgatattgtgggaagtgcttattatgtagctccagaagttttgcatagatcttatgggacagaggcagatatgtggagcattggtgtaattgcttatattcttttatgcggaagccgtcccttttgg

SEQ ID NO: 30986 - DNA, 312 bp, Glycine max
  modified_base (3)..(3): a, c, g, t, unknown, or other
gtnaacaactgggttacaagagcatactgccacaaggctcttcgtctctcagctgctactcaggatttaccaaagtctgtaatttgcaatgttcatggtgtgaatcccatattctcgaaaattggagaaaagattgctgcagagagggagctagggcagaaagcctttacaaaaggggcgtatttcttgagaaagatggtgtgggcaaagggatacaaggagttgatagatttattagcaaagcacaaggctgaccttgatggcttcaagatggatgtatttggaaatggagaggatgctaatgaagtacat

SEQ ID NO: 30987 - DNA, 366 bp, Glycine max
tgccgtaccgaaccggaagtttccggctcgaccgtacgcgtccgttcggatgagacaacacaagggggagcaagagtgaatagcgaagagaatggctccgaagggtttaatctttttggctgtgttatgcttctcagcactgtcactgagtcgttgtcttgcggaggataatggacttgttatgaacttctacaaggaatcatgccctcaggctgaagacatcatcaaagaacaagtcaagcttctctacaagcgccacaagaacactgctttctcctggctcagaaacatcttccatgactgtgctgttcagagttgtgatgcttcacttgtgctggactccacaagaaagagcttgtctgagaa

SEQ ID NO: 30988 - DNA, 373 bp, Glycine max
accgggccggaaattccggggtggaccaacgcgtccgtccagccgtccgaccccaagagaccgccgaagggggaccgaatggatggtttaaaaccaaccaagggctcacaatctttttggcaccccattggtgatcacttccgatagctctcacaatcctatggcggagaacaacaacaaccaccaccttgaaaccgccaccagaaggcttgcctatgtgaccaaccacctcactacttcttcttatcacaacgcacccggcgaactcgccccgtgcctcacttccggtgggaacaacagcttccgccgcgtccacggagaagttccatcccacgacgtcgtttggaggatcgacgacttcgaccacgacaac

SEQ ID NO: 30989 - DNA, 295 bp, Glycine max
tggagaagaccacaaaagggggagggggaaagaaaaaccaaccaacccttgttgggggtgaacggaccccccaaggtcgatcctacttgaaggggaataaggcccaatttgcatgaattgaaatcggcggaaatgggagctagtcgaaagcttcagggcgagattgatcgtgttctcaagaaagttcaggaaggcgtcgaagtcttcgatagcatctggaacaaggtttacgacactcgatatgccaaccagaaggagaagttcgaggccgacctgaagaaggagattaagaagc

SEQ ID NO: 30990 - DNA, 129 bp, Glycine max
tacgttctgtcctaagttacttgaaactttgacctggtattttgattttaatggtgagacgtgtgctactgctacatcataattcccatcaaatttaattatcgatgggttagaatttcattaatttat

SEQ ID NO: 30991 - DNA, 389 bp, Glycine max
ggccggcaaaataaagagtcctaatgagaagttgagtggtcctcttgatgagattgtcaagaggagaatggaagacaagaatagaacttcaaagaatttcttgtcactcattttgaatgcaagagaatcaaagaaagtatctgaaaatgtcttttcacctgattacattagcgctgttacttatgagcacttacttgctgggtcagctaccacagcctttaccttgtcatccattgtctacttggttgctggacaccgagaggttgagaaaaagttgcttcaagagattgatggatttggtccacctgataggattcccacagctcaagatcttcatgacaagtttccttatcttgatcaggtgattaaagaggccatgaggttttaca

SEQ ID NO: 30992 - DNA, 193 bp, Glycine max
ccaggcgtgagacgacgcctgaggggggacagacggacgggtgaggaataacaacctagggggggtcgatggtgtgggcattcaaacctaaagcttgcgtctgtcggcttgggttggagcttgtgctgcgtaaagaggaaccatgtctgactgttgcggtaactgcgtctctgaaactatggctaatactgca

SEQ ID NO: 30993 - DNA, 436 bp, Glycine max
gtatcaagggataaataatcggaccggtccttagatttttttaaggctttaagggagccgtatgaggtgaaaatctcatgtacggttctgtaatagagatggtaacagtaatgtcatcaccgactaggattatctaacagtttaagtacagttgatatagttgatgcacaatcaaaatatggtttttggggatggaatttgtggcgtcaacctatgggtttcattgtttttctaatctcgtccctagcagaatgtgaaagattaccttttgatttaccggaagcggaagaagaactagtagcgggttatcaaaccgaatactcgggtatcaaatttggtttattttatgttgcttcctatttaaacctattcatttcttccttatttgtaacagttctttacttttgtggttcaaatatctctattccatacatat

SEQ ID NO: 30994 - DNA, 52 bp, Glycine max
ccacgcgttcgaccacgcgttcgcgcactcgtccggccacgcgtgcgccgag

SEQ ID NO: 30995 - DNA, 271 bp, Glycine max
cgcacgcacccgtacacttcagatacgacttcagatttagacatacttcgagcaagaagggccacggtgtgaatctataatagttacaggcgttcccacactcaccaacatccacaccatactgaccctttattaacatcactctactatcaatgtatcacactaaatttacatggacgattactaattcacccataacgacttccctcatctaggactctctcattctatagtttccttgcatatctttaagctactccttaatcacttt

SEQ ID NO: 30996 - DNA, 372 bp, Glycine max
atggggccacgatgaagaaatccggggaaattatggcgaccaatttggtttagcaaacaaaacaaagcacaccagaaaaacatctcctgctaatgctatacttgataaactacgggtctaacacattgatcattacaaccggtgagtttcaagaactgaaatcagagcaaaatcttcaaaggaaactaattaaactagtaaaagaaacccagcactttcccaccaacattctttctcctagcttcttcatgatccatgatgccagctgaggtagtcaacacaatatacccaaactgcaacatttgtgtaaacaaaggttagggtcaacaatggaaactgtgtacaaagcctataccatgattaaaaaattta

SEQ ID NO: 30997 - DNA, 319 bp, Glycine max
gatttcccggtcggcccacgccttccgattccaaagaagggtgtgggtgattccattcgaacaccagacaaccaccaccaatcttaaggtggctttcttctcttttggtcgaccgtgtcacgtgcgagaacaatgagaattgccattttccgctccctatctaaacctttgaatcttattcgattcaatttcatcacgacttaaataccatcgcatgttcattcattgatggtcatgttctttccttaaaccttcttcaaaaagtcaaaattgaaaacctttctctctcttaactccttctcgtcatcgccccaaagct

SEQ ID NO: 30998 - DNA, 297 bp, Glycine max
tttttttttttttgttgagcttcgttcaggtttggattgaaagttttctcctttacttgttcattttgatttggtttttcttgctttgcattttgagcaccccttttgatctggggcgttctggtgtttgtgtggttctctgttttagtgttttctttttggggatttcggagtggaagtgggagtttgggtgatctgggttttgagttgaggtaaggggtttgttggatgcacctattggcttaaatcatttgaagggtttttatgcttagttgcaaagatgcttcctgatcagag

SEQ ID NO: 30999 - DNA, 388 bp, Glycine max
tacagatgacaaaaaaacttcagattgtgaacgagtaaaaaagaaagatcgtgtttggtattatatttaacagcgatgtagacgtattgaagatgttaaagtttggatcacacaaattctctgagaggcaagcactttttacatgagctaagagtgacaattactactactaggcaccaccagcacccttgtttgatccaggtgagttaaagtcatgctctttttacagagctttgatctcacagtttgttgccacattctttttcctctacatcactgtcttgactgtcatgggtttcaacatggcacccaacaagtgcttttctgttgtcattcaaagaatttcatgggctttttgtggcatgaatctttcccttttctacttcac

SEQ ID NO: 31000 - DNA, 402 bp, Glycine max
  modified_base (305)..(305): a, c, g, t, unknown, or other
aaatcccgggtcgacccacgccttcggccacgccttcggccaccccttcggccacgccttccaccgcttgcaaaaaaccaccgaagggggaaaaaaaaaatgaaagaaaatatcttaaacttttattcttaaaatccaaacgaagtaattagtgctgcttcttcttctgaatcaaatcattcatcactctctggttctgatttttctgacaccaaaatggtgaatcctcgaattccacgttcaaagatcccaactttcacacttttcacttctgctatctccatcgttctgtgcattttcttcgntctctcttttctcttcactgcccattcttattcctcccatcaacaccacaacgcgggttctgacggtggtgttgcacatggatttgagtcgattaag

SEQ ID NO: 31001 - DNA, 105 bp, Glycine max
gggaggggaggttgctacaacaccaaaaaaaatggggcaactagcgggcggtctaaaggaaccaagcttacttacgcgagcatgcgaaaccatacctgttattta

SEQ ID NO: 31002 - DNA, 391 bp, Glycine max
  modified_base (46)..(46): a, c, g, t, unknown, or other
ccgggccggaatacccgggcggacccacgcggacaccaccacgganggggcaattgacgggggagaacaagatcaacaggcaagtgacctttgcaaaacgaatgaacgggcttttgaagaaagcttacgagctttccgttctttgtgatgccgaggttgctctcatcatcttctccaatagaggaaaactgtacgagttctgcagcagttcaagcatgctcaaaacgctagagaggtaccagaaatgtaactatggtgcgcctgaggctaatgtgtctacacgggaagccttggagttaagcagtcaacaggagtacttgaagctgaaggcacgttatgagtccctacaacggtcccagaggaaccttatgggagaagatctttgcccttt

SEQ ID NO: 31003 - DNA, 397 bp, Glycine max
ggcacaagtgaatttgttgatcgagataactagaaacagtgtgatgaaaatgaacgtccttgttttcttcgatgctacaattttggtagcatggcaatgtcatgcgtacgatatgttccctctacgaatgaacactggctatggtgcccgtactccggagatgaaatgcgcaagatggaggcttgctgtggaagcacacaacatctgtggctctgagaccattcctgaagagtgcgttgaagcaacaaaggaatacatgcatggcgaacaatatagatcagactccaaaacaggtaaccaacaagcttacttttatgccagagacctcgaagtccataccgaggacacatttgtgttcagtatagatggcaccgtactctgtaatattccatactac

SEQ ID NO: 31004 - DNA, 278 bp, Glycine max
tcaacaaaggacagaaacagatccactatctgttttacgtcaggcaatacgtggagtaactcccgatatagcagtaaaagcaagacgcgtaagcggatcaactcatcaaggtcccgttgaaataggatccacacatggaaaagcacttgctattcgttgggtattgggggcatgccgaaaacgttcgggtcgaaatatggctttcaaattaagttccgaattagtggatgctgccaaaagtagtggcgatgccatacgcaaaaaaaaaaaaagcacgc

SEQ ID NO: 31005 - DNA, 243 bp, Glycine max
cccggcatcctaatttcactttgtttgagggttccttttttccttggtcactttttaccatgatgtttaacatgggggttgctttcaattctcatagttgatccaaaaggttacttgaaagtgtgtctcttttttttttttttaaactttctatttttgagctgaggatgatggagtgtgggagaaagaaggagaatcaaaatcccaactccactttccctgatgaggtgttggagcgaattt

SEQ ID NO: 31006 - DNA, 274 bp, Glycine max
gggtgagaaaaatgggacgcggaaacacgcgcatgttcacgatcctggaatccaccgcggcgtattcagcgattccgatctccgacgagtctgcgcaggcgaagaatcgcgaggccagccgccggtgaagaatcgcgcgatttgtctggaaatcgcgattcagccacgattcatccccgatactgagactcaaccacgattcaggaagaaaaacgagacaacctccgattcgtatcggtagcaagtggaatcatatcgaatcgggcgatacata

SEQ ID NO: 31007 - DNA, 293 bp, Glycine max
acgcgtccgaacacgtgcgaaaaaacaacttaagatgatcactctttgactactaggcaataggcttgagtgggaaacctaactcgatataaggacccaccatctcccttggtttggattgttattccataaaattgaatctggtgttttacccacaccaacggaggaattaaaatatacacttgatatgttccctgcacattccttattacacataatttaatttcataaaaggctgttcgatattaagcatattttatgataaacattttgcactgtctacgatgctcacg

SEQ ID NO: 31008 - DNA, 446 bp, Glycine max
gtttggaatggccggggcgacgccacgcgtccgtatgcgataagactacagattgtgagagtaaaggatgcggaaagagatctttgagccaaactacttgtcaaccttgcgaaatctcaccatggaaccttgaatcaagttcagctcattaaagggtttgaatctgctctcagtacattggaggatgctgttaatgatgctcccagagcatcagagtttcttggccgaatttttgcaaaagccataacagagaatgtagtttctttgaaggagattgggcagttaatacatgatggtggagaggagccaggtaatctcttagaagttggacttgcagctgatgttcttggaagcactttggatgtaattcaaagcgaaaagggggaccgtggttctaaacgagatgctttcaaactctaacttgaggttggaaacttttcggcaac

SEQ ID NO: 31009 - DNA, 296 bp, Glycine max
tttaaggtactgctaaaagctaaatatcatggaggtactcaaattagcatggctgtcatggctgcattcttgaatttgatcatcatcttttcagcagtctctacaacaggcaagtcactgagctcaaactactatgcaaaaacatgccctaatgtggagttcattgttgccaacgcattaaaggatgccactgctagggacaaaactgttccagcaccaattctgcgaatgcacttccatgattgtttcggtcgcaggtgatgatgcctctgcgctggctcaattcataaggaaac

SEQ ID NO: 31010 - DNA, 387 bp, Glycine max
gggagtcgcgtctgataataaaaatacacagtgagctctcgcttctagccctagggcgctgctcccgattttctctcttcggattgagtgaattgtgaaatgggttggaaagctgctgagaaactcattaggcactggaaagttgtcagaggggataatgttatgataataaggggcaaagataagggcgagactgggactattaagcgtgtcattcgctctcagaatcgtgtcattgttgaaggtaaaaatctggtgaaaaagcacatcaagcaagggcaaggtcatgaagggggcatctttacagttgaagctccaatccatgccttcaatgtgcaagttcttgacccagtgacagggaagcctttgcagattggacacaaatat

SEQ ID NO: 31011 - DNA, 385 bp, Glycine max
gggattgaatacgaacctgtaacatgaaggctacgactataacagtaagaaatagtgctgcagtctcaaaaagttgaaagtttaagtccataggttgccctattatccagccaataacaacacaaaatggtatctgcataaggaaaaggaaaacgtgaaggaaatgaaagactttttgttattaggaggaacttataaatgaaaaaagcagattactgtccatgaatgctgcatcaagccatcaactactacataaaggaagaagttgaaaaaattcagtggtttcatcacttagtttcaatcgtactattatgttatatatcctactaaattttgctttttcttatttagacaacatgccaatcttttagcatggtgaactcca

SEQ ID NO: 31012 - DNA, 90 bp, Glycine max
gaattctccgggtcgacctacgcgttcgaacatttgttacacgaccatacaacggcctacctattctgtagtgtcacctaacttcaatgg

SEQ ID NO: 31013 - DNA, 361 bp, Glycine max
gaattgcgtactagtaactctctctctctctctgggaattgggtgcttctatttgtttaatggaagattatttatgggtttagattattgggtttaacagttcatgcctagtcaccaatacgcgtttggtatacgtattgaaatctttctttcttcttttgtgcaaatttgcttggtctagcagccatatctgcatctggttttgcgcgtggtgtacacccagacattctcgctgatctagttgggataaagtgtctctttatattgccaataagagtttactgtgtggcaagagtgttttatgtttgaggtcttatatacttgtgagaaaagagctttttggatttgagtagtacgggtg

SEQ ID NO: 31014 - DNA, 349 bp, Glycine max
gaatttggaatccaaaaatgttggtgttgtattaatgggtgatggtttgatgatacaagagggaagttcagtaaaagcaacaggaagaattgctcagatacctgtaagtgaggcttatttgggtcgtgttataaatgccctggctaaaccaattgatggtcgaggagaaatttcagcttcggaatctcgattaatcgaatctcctgctcccggtattatttcgagacgttccgtatatgagcctctccaaacaggacttattgctattgattcgatgatccccataggacgtggccaacgagaattaattattggagacagacaaacgggtaaaacagcaatagccaca

SEQ ID NO: 31015 - DNA, 389 bp, Glycine max
ttctataagactacttaaggtttttgaagaaattcaactccaccgggtatagtgaattgtttaacaagggcaatccaccatctctgtcctatactcttaataattacaacaagctgcagtctcttgtcttcaatattatattcttgtcaataaaaacactgtacaaacattccttaacagaatcaaacttaaataatgctgtcttccacacattggaaaaattaattctcaaagatccacaagatccttccacttcaaatgcaatttcatacaaaacatctcctaaaaataaacttataagtcaattatacaacattgtttagatcattgtaaaccaaattatcaatctcctttttatccacatattctaaatcatgacctttaatctt
